(19) United States
(12) Patent Application Publication
(10) Pub. No.: US 2024/0216518 A1
(43) Pub. Date: Jul. 4, 2024

(54) EXTENDED-RELEASE IMMUNE CELL ENGAGING PROTEINS AND METHODS OF TREATMENT

(71) Applicant: Harpoon Therapeutics, Inc., South San Francisco, CA (US)

(72) Inventors: Holger WESCHE, San Francisco, CA (US); Shuoyen Jack LIN, San Bruno, CA (US); Kathryn KWANT, San Bruno, CA (US); Bryan D. LEMON, Mountain View, CA (US); Richard J. AUSTIN, San Francisco, CA (US)

(21) Appl. No.: 18/525,574

(22) Filed: Nov. 30, 2023

Related U.S. Application Data
(63) Continuation of application No. PCT/US2022/034856, filed on Jun. 24, 2022.
(60) Provisional application No. 63/328,603, filed on Apr. 7, 2022.
(60) Provisional application No. 63/276,804, filed on Nov. 8, 2021.
(60) Provisional application No. 63/214,963, filed on Jun. 25, 2021.

(51) Int. Cl. A61K 47/64; A61P 35/00

(52) U.S. Cl. CPC A61K 47/64; A61P 35/00

(57) ABSTRACT

Provided herein are descriptions of extended-release immune cell binding protein comprising a masking peptide and cleavable linker, and the methods of using thereof. Also described is a pharmaceutical composition comprising a protein with a masking peptide and a cleavable linker, and the method of using thereof.

### CROSS-REFERENCE

[0001] This application is a continuation application of International Application NO: PCT/US2022/034856, filed Jun. 24, 2022; and claims the benefit of U.S. Provisional Patent Application No. 63/214,963, filed Jun. 25, 2021; U.S. Provisional Patent Application No. 63/276,804, filed Nov. 8, 2021; and U.S. Provisional Patent Application No. 63/328,603, filed Apr. 7, 2022; each of which are incorporated herein by reference in their entirety.

### SEQUENCE LISTING

[0002] The instant application contains a Sequence Listing which has been submitted electronically in XML file format and is hereby incorporated by reference in its entirety. Said XML copy, created on Feb. 13, 2024, is named 47517-754_301_SL.xml and is 5,107,733 bytes in size.

### INCORPORATION BY REFERENCE

[0003] All publications, patents, and patent applications mentioned in this specification are herein incorporated by reference to the same extent as if each individual publication, patent, or patent application was specifically and individually indicated to be incorporated by reference.

### BACKGROUND

[0004] Cancer is the second leading cause of human death next to coronary disease. Worldwide, millions of people die from cancer every year. In the United States alone, cancer causes the death of well over a half-million people each year, with some 1.4 million new cases diagnosed per year. While deaths from heart disease have been declining significantly, those resulting from cancer generally are on the rise. In the early part of the next century, cancer is predicted to become the leading cause of death.

[0005] Moreover, even for those cancer patients that initially survive their primary cancers, common experience has shown that their lives are dramatically altered. Many cancer patients experience strong anxieties driven by the awareness of the potential for recurrence or treatment failure. Many cancer patients experience significant physical debilitations following treatment.

[0006] Generally speaking, the fundamental problem in the management of the deadliest cancers is the lack of effective and non-toxic systemic therapies. Cancer is a complex disease characterized by genetic mutations that lead to uncontrolled cell growth. Cancerous cells are present in all organisms and, under normal circumstances, their excessive growth is tightly regulated by various physiological factors. Controlling the toxicity of various cancer therapies remain an important and unsolved issue.

### SUMMARY OF THE INVENTION

[0007] Provided here in is a pharmaceutical composition comprising an extended-release binding protein which comprises a half-life extended immune cell engaging protein, a masking peptide, and a cleavable linker, wherein the masking peptide is covalently linked to the N-terminus or the C-terminus of the half-life-extended immune cell engaging protein through the cleavable linker, and wherein the cleavable linker is significantly cleaved in systemic circulation. In some embodiments, the extended-release binding protein has a higher therapeutic index than a corresponding half-life-extended immune cell engaging protein without the masking peptide. In some embodiments, administration of the extended-release binding protein results in a lower Cmax/Cmin ratio of an active version of the extended-release binding protein in systemic circulation than the Cmax/Cmin ratio when a corresponding half-life extended immune cell engaging protein without the masking peptide is administered. In some embodiments, multiple administration of the extended-release binding protein results in a more gradual increase of a level of an active version of the extended-release binding protein in systemic circulation than when a corresponding half-life-extended immune cell engaging protein without the masking peptide is administered. In some embodiments, administration of the extended-release binding protein results in a lower Cytokine release syndrome (CRS) level than the CRS observed when a corresponding half-life extended immune cell engaging protein without the masking peptide is administered.

[0008] In some embodiments, the half-life extended immune cell engaging protein comprises an immune cell engaging domain. In some embodiments, the immune cell engaging domain comprises a natural killer (NK) cell engaging domain, a T cell engaging domain, a NK-T cell engaging domain, a B cell engaging domain, a dendritic cell engaging domain, a macrophage cell engaging domain, or a combination thereof. In some embodiments, the immune cell engaging domain comprises the T cell engaging domain. In some embodiments, the T cell engaging domain binds a CD3 molecule. In some embodiments, the CD3 molecule is at least one of: a CD3γ molecule, a CD3δ molecule, or a CD3ε molecule.

[0009] In some embodiments, the half-life extended immune cell engaging protein comprises a first domain (A), a second domain (B), and a third domain (C), wherein (i) the first domain (A) is the T cell engaging domain and specifically binds to human CD3, (ii) the second domain (B) specifically binds to human serum albumin (HSA), and (iii) the third domain (C) specifically binds to a target antigen; and wherein the domains are linked in one of the following orders: H₂N-(C)-(B)-(A)-COOH, H₂N-(A)-(B)-(C)-COOH, H₂N-(B)-(A)-(C)-COOH, H₂N-(C)-(A)-(B)-COOH, H₂N-(A)-(C)-(B)-COOH, H₂N-(B)-(C)-(A)-COOH, or by linkers L1 and L2 in one of the following orders: H₂N-(C)-L1-(B)-L2(A)-COOH, H₂N-(A)-L1-(B)-L2-(C)-COOH, H₂N-(B)-L1-(A)-L2-(C)-COOH, H₂N-(C)-L1-(A)-L2-(B)-COOH, H₂N-(A)-L1-(C)-L2(B)-COOH, H₂N-(B)-L1-(C)-L2-(A)-COOH. In some embodiments, the third domain comprises a single domain antibody (sdAb), a single-chain variable fragment (scFv), a variable heavy domain (VH), a variable light domain (VL), antigen-binding fragment (Fab), a DARPin or a peptide. In some embodiments, the masking peptide inhibits or reduces the binding of the first domain (A) to the human CD3. In some embodiments, the masking peptide inhibits or reduces the binding of the first domain (A) to the N-terminus of human CD3. In some embodiments, the masking peptide comprises an amino acid sequence having at least 80% homology to QDGNEE (SEQ ID NO: 3068). In some embodiments, the masking peptide comprises an amino acid sequence selected from the group consisting of SEQ ID NOS: 3068 and 3633-3652. In some embodiments, the masking peptide inhibits or reduces the binding of the third domain (C) to the target antigen. In some embodiments, the cleavable linker comprises a cleavage site. In some embodiments, the cleavable site is recognized by a protease. In some embodiments, the protease is selected from the group consisting of a serine protease, a cysteine protease, an aspartate protease, a threonine protease, a glutamic acid protease, a metalloproteinase, a gelatinase, and an asparagine peptide lyase. In some embodiments, the protease is present in blood circulation. In some embodiments, the protease is selected from the group consisting of a Cathepsin, a Cathepsin B, a Cathepsin C, a Cathepsin D, a Cathepsin E, a Cathepsin H, a Cathepsin S, a Cathepsin K, a Cathepsin L, a kallikrein, a hK1, a hK10, a hK15, a plasmin, a collagenase, a Type IV collagenase, a stromelysin, a Factor Xa, a chymotrypsin-like protease, a trypsin-like protease, a elastase-like protease, a subtilisin-like protease, an actinidain, a bromelain, a calpain, a caspase, a caspase-3, a Mir1-CP, a papain, a HIV-1 protease, a HSV protease, a CMV protease, a chymosin, a renin, a pepsin, a matriptase, a legumain, a plasmepsin, a nepenthesin, a metalloexopeptidase, a metalloendopeptidase, a matrix metalloprotease (MMP), a MMP1, a MMP2, a MMP3, a MMP7, a MMP8, a MMP9, a MMP10, a MMP11, a MMP12, a MMP13, a MMP14, an ADAM10, an ADAM12, an urokinase plasminogen activator (uPA), an enterokinase, a prostate-specific target (PSA, hK3), an interleukin-1β converting enzyme, a thrombin, a FAP (FAP-α), a type II transmembrane serine protease (TTSP), a neutrophil elastase, a cathepsin G, a proteinase 3, a neutrophil serine protease 4, a mast cell chymase, a mast cell tryptase, a dipeptidyl peptidase, and a dipeptidyl peptidase IV (DPPIV/CD26).

[0010] In some embodiments, the cleavable linker comprises an amino acid sequence having at least 80% homology to SEQ ID NOS: 3688-3770 and SEQ ID NO: 3878. In some embodiments, the cleavable linker comprises an amino acid sequence of SEQ ID NOS: 3688-3770 and SEQ ID NO: 3878. In some embodiments, the target antigen is a tumor antigen. In some embodiments, the third domain specifically binds to a target antigen selected from the group consisting of: CD19 (B-lymphocyte antigen CD19, B-Lymphocyte Surface Antigen B4, T-Cell Surface Antigen Leu-12, CVID3), PSMA (prostate specific membrane antigen), MSLN (mesothelin), BCMA (B-cell maturation antigen), DLL3 (Delta-like ligand 3), FLT3 (FMS-like tyrosine kinase 3), CD20 (B-lymphocyte antigen CD20, MS4A1, B1, Bp35, CVID5, LEU-16, MS4A2, S7, membrane spanning 4-domains A1), CD22 (SIGLEC-2, SIGLEC2), CD25 (IL2RA, interleukin-2 receptor alpha chain), CD27 (S152, S152. LPFS2, T14, TNFRSF7, Tp55), CD30 (TNFRSF8), CD33 (Siglec-3, sialic acid binding Ig-like lectin 3, SIGLEC3, SIGLEC-3, gp67, p67), CD37 (GP52-40, TSPAN26), CD38 (cyclic ADP ribose hydrolase, ADPRC1, ADPRC 1), CD40 (Bp50, CDW40, TNFRSF5, p50), CD44 (HCAM, homing cell adhesion molecule), Pgp-1 (phagocytic glycoprotein-1), Hermes antigen, lymphocyte homing receptor, ECM-III, and HUTCH-1), CD48 (BLAST-1, B-lymphocyte activation marker, SLAMF2, signaling lymphocytic activation molecule 2), CD52 (CAMPATH-1 antigen), CD70, CD73 (NT5E, ecto-5′-nucleotidase), CD39 (ENTPD1, Ectonucleoside triphosphate diphosphohydrolase-1), CD74 (HLA class II histocompatibility antigen gamma chain, HLA-DR antigens-associated invariant chain), CD79b (immunoglobulin-associated beta), CD80 (B7-1), CD86 (B7-2), CD123 (IL3RA, interleukin-3 receptor), CD133 (PROM1), CD137 (TNFRSF9, tumor necrosis factor receptor superfamily member 9, 4-1BB, ILA, induced by lymphocyte activation), CD138 (SDC1), alpha fetoprotein (AFP), c-Met; c-Kit; CD371 (CLEC12A, C-type lectin domain family 12 member A, CLL1)); CD370 (CLEC9A, C-type lectin domain containing 9A); cadherin 3 (CDH3, p-cadherin, PCAD); carbonic anhydrase 6 (CA6); carbonic anhydrase 9 (CA9, CA1X); carcinoembryonic antigen related cell adhesion molecule 3 (CEACAM3); carcinoembryonic antigen related cell adhesion molecule 5 (CEACAM5); CD66c (CEACAM6, carcinoembryonic antigen related cell adhesion molecule 6); chorionic somatomammotropin hormone 1 (CSH1, CS1); coagulation factor III, tissue factor (F3, TF); collectin subfamily member 10 (COLEC10); delta like canonical Notch ligand 3 (DLL3); ectonucleotide pyrophosphatase/phosphodiesterase 3 (ENPP3); ephrin A1 (EFNA1); epidermal growth factor receptor (EGFR); EGFR variant III (EGFRvIII); EPH receptor A2 (EPHA2); epithelial cell adhesion molecule (EPCAM); erb-b2 receptor tyrosine kinase 2 (ERBB2, HER2); fibroblast activation protein alpha (FAP); fibroblast growth factor receptor 2 (FGFR2); fibroblast growth factor receptor 3 (FGFR3); folate hydrolase 1 (FOLH1, PSMA); folate receptor 1 (FOLR1, FRa); GD2 ganglioside; glycoprotein NMB (GPNMB, osteoactivin); guanylate cyclase 2C (GUCY2C, GCC); human papillomavirus (HPV) E6; HPV E7; major histocompatibility complex (MHC) class I-presented neoantigens, major histocompatibility complex (MHC) class II-presented neoantigens, major histocompatibility complex, class I, E (HLA-E); major histocompatibility complex, class I, F (HLA-F); major histocompatibility complex, class I, G (HLA-G, MHC-G); integrin subunit beta 7 (ITGB7); leukocyte immunoglobulin like receptor B1 (LILRB1, ILT2); leukocyte immunoglobulin like receptor B2 (LILRB2, ILT4); LY6/PLAUR domain containing 3 (LYPD3, C4.4A); glypican 3 (GPC3); KRAS proto-oncogene, GTPase (KRAS); MAGE family member A1 (MAGEA1); MAGE family member A3 (MAGEA3); MAGE family member A4 (MAGEA4); MAGE family member A1 l (MAGEA11); MAGE family member C1 (MAGEC1); MAGE family member C2 (MAGEC2); MAGE family member D1 (MAGED1); MAGE family member D2 (MAGED2); mesothelin (MSLN); mucin 1 (MUC1) and splice variants thereof (e.g., MUC1/C, D, and Z); mucin 16 (MUC16); necdin (NDN); nectin cell adhesion molecule 4 (NECTIN4); SLIT and NTRK like family member 6 (SLITRK6); promyelocytic leukemia (PML, TRIM19); protein tyrosine kinase 7 (inactive) (PTK7); CD352 (SLAMF6, SLAM family member 6); CD319 (SLAMF7, SLAM family member 7, 19A, CRACC, CS1); sialic acid binding Ig like lectin 7 (SIGLEC7); sialic acid binding Ig like lectin 9 (SIGLEC9); solute carrier family 34 (sodium phosphate), member 2 (SLC34A2); solute carrier family 39 member 6 (SLC39A6, LIV1); STEAP family member 1 (STEAP1); STEAP family member 2 (STEAP2); CD134 (TNFRSF4, TNF receptor superfamily member 4, OX40); CD137L (TNFSF9, TNF superfamily member 9, 4-1BB-L); CD261 (TNFRSF10A, TNF receptor superfamily member 10a, DR4, TRAILR1); CD262 (TNFRSF10B, TNF receptor superfamily member 10b, DR5, TRAILR2); CD267 (TNFRSF13B, TNF receptor superfamily member 13B, TACI, IGAD2); CD269 (TNFRSF17, TNF receptor superfamily member 17, BCMA); CD357 (TNFRSF18, TNF receptor superfamily member 18 GITR); transferrin (TF); transforming growth factor beta 1 (TGFB1); trophoblast glycoprotein (TPBG, 5T4); trophinin (TRO, MAGED3); tumor associated calcium signal transducer 2 (TACSTD2, TROP2, EGP1); Fucosyl GM1; sialyl Lewis adhesion molecule (sLe); ROR1; CD30; and Lewis Y antigen.

[0011] In some embodiments, the third domain specifically binds to CD19. In some embodiments, the third domain comprises an amino acid sequence having at least 80% homology to SEQ ID NOS: 3771-3792. In some embodiments, the third domain comprises an amino acid sequence having at least 90% homology to SEQ ID NOS: 3771-3792. In some embodiments, the third domain comprises an amino acid sequence of SEQ ID NOS: 3771-3792. In some embodiments, the third domain comprises an amino acid sequence of SEQ ID NO: 3771. In some embodiments, the domains of the half-life extended immune cell engaging protein are linked in one of the following orders: H₂N-(C)-(B)-(A)-COOH, H₂N-(C)-(A)-(B)-COOH, or by linkers L1 and L2 in one of the following orders: H₂N-(C)-L1-(B)-L2-(A)-COOH, H₂N-(C)-L1-(A)-L2-(B)-COOH. In some embodiments, the half-life extended immune cell engaging protein comprises an amino acid sequence of SEQ ID NOS: 3839-3843. In some embodiments, the half-life extended immune cell engaging protein comprises an amino acid sequence of SEQ ID NOS: 3839-3843.

[0012] In some embodiments, the third domain specifically binds to CD20. In some embodiments, the third domain comprises an amino acid sequence having at least 80% homology to SEQ ID NOS: 3793-3808 and 3880. In some embodiments, the third domain comprises an amino acid sequence having at least 90% homology to SEQ ID NOS: 3793-3808 and 3880. In some embodiments, the third domain comprises an amino acid sequence of SEQ ID NOS: 3793-3808 and 3880. In some embodiments, the third domain comprises an amino acid sequence of SEQ ID NO: 3793. In some embodiments, the domains of the half-life extended immune cell engaging protein are linked in the following order: H₂N-(A)-(B)-(C)-COOH, or by linkers L1 and L2 in the following order: H₂N-(A)-L1-(B)-L2-(C)-COOH.

[0013] In some embodiments, the third domain specifically binds to CD33. In some embodiments, the third domain comprises an amino acid sequence having at least 80% homology to SEQ ID NOS: 3809-3823. In some embodiments, the third domain comprises an amino acid sequence having at least 90% homology to SEQ ID NOS: 3809-3823. In some embodiments, the third domain comprises an amino acid sequence of SEQ ID NOS: 3809-3823. In some embodiments, the third domain comprises an amino acid sequence of SEQ ID NO: 3809. In some embodiments, the domains of the half-life extended immune cell engaging protein are linked in one of the following orders: H₂N-(C)-(B)-(A)-COOH, H₂N-(A)-(B)-(C)-COOH, H₂N-(C)-(A)-(B)-COOH, H₂N-(A)-(C)-(B)-COOH, or by linkers L1 and L2 in one of the following orders: H₂N-(C)-L1-(B)-L2(A)-COOH, H₂N-(A)-L1-(B)-L2-(C)-COOH, H₂N-(C)-L1-(A)-L2-(B)-COOH, H₂N-(A)-L1-(C)-L2(B)-COOH. In some embodiments, the half-life extended immune cell engaging protein comprises an amino acid sequence of SEQ ID NOS: 3833-3837. In some embodiments, the half-life extended immune cell engaging protein comprises an amino acid sequence of SEQ ID NOS: 3834-3837.

[0014] In some embodiments, the third domain specifically binds to FLT3. In some embodiments, the third domain is a single domain antibody that specifically binds to FLT3. In some embodiments, the third domain comprises a CDR1 comprising an amino acid selected from the group consisting of SEQ ID NOS: 1080-1155 and 3497-3498, a CDR2 comprising an amino acid selected from the group consisting of SEQ ID NOS: 1156-1231, and 3499-3500, a CDR3 comprising an amino acid selected from the group consisting of SEQ ID NOS: 1232-1307, and 3501-3502. In some embodiments, the CDR1 comprises an amino acid sequence selected from the group consisting of SEQ ID NOS: 1150, 1152, 3497, and 3498; the CDR2 comprises an amino acid sequence selected from the group consisting of SEQ ID NOS: 1226, 1228, 3499, and 3500; the CDR3 comprises an amino acid sequence selected from the group consisting of SEQ ID NOS: 1302, 1304, 3501, and 3502. In some embodiments, the third domain comprises an amino acid sequence selected from the group consisting of SEQ ID NOS: 1004-1079 and 3495-3496. In some embodiments, the third domain comprises an amino acid sequence selected from the group consisting of: SEQ ID NOS: 1074, 1076, 3495, and 3496. In some embodiments, the third domain comprises an amino acid sequence of SEQ ID NO: 1074. In some embodiments, the domains of the half-life extended immune cell engaging protein are linked in one of the following orders: H₂N-(C)-(B)-(A)-COOH, H₂N-(A)-(B)-(C)-COOH, H₂N-(C)-(A)-(B)-COOH, H₂N-(A)-(C)-(B)-COOH, or by linkers L1 and L2 in one of the following orders: H₂N-(C)-L1-(B)-L2(A)-COOH, H₂N-(A)-L1-(B)-L2-(C)-COOH, H₂N-(C)-L1-(A)-L2-(B)-COOH, H₂N-(A)-L1-(C)-L2(B)-COOH. In some embodiments, the half-life extended immune cell engaging protein comprises an amino acid sequence of SEQ ID NOS: 3844-3849. In some embodiments, the half-life extended immune cell engaging protein comprises an amino acid sequence of SEQ ID NOS: 3846-3849. In some embodiments, the third domain comprises an amino acid sequence of SEQ ID NO: 1076. In some embodiments, the domains of the half-life extended immune cell engaging protein are linked in the following order: H₂N-(C)-(B)-(A)-COOH, or by linkers L1 and L2 in the following order: H₂N-(C)-L1-(B)-L2(A)-COOH. In some embodiments, the half-life extended immune cell engaging protein comprises an amino acid sequence of SEQ ID NOS: 3850-3855. In some embodiments, the half-life extended immune cell engaging protein comprises an amino acid sequence of SEQ ID NO: 3854.

[0015] In some embodiments, the third domain is a single domain antibody that specifically binds to PSMA. In some embodiments, the third domain comprises a CDR1 comprising an amino acid sequence selected from the group consisting of SEQ ID NOS: 462-465, a CDR2 comprising an amino acid sequence selected from the group consisting of SEQ ID NOS: 466-472, and a CDR3 comprising an amino acid sequence selected from the group consisting of SEQ ID NOS: 474-475. In some embodiments, the CDR1 comprises the amino acid sequence of SEQ ID NO: 462, the CDR2 comprises the amino acid of SEQ ID NO: 473, the CDR3 comprises the amino acid sequence of SEQ ID NO: 474. In some embodiments, the third domain comprises an amino acid sequence selected from the group consisting of SEQ ID NOS: 476-489. In some embodiments, the third domain comprises the amino acid sequence of SEQ ID NOS: 489. In some embodiments, the half-life extended immune cell engaging protein comprises an amino acid sequence of SEQ ID NO: 3824-3831.

[0016] In some embodiments, the third domain is a single domain antibody that specifically binds to MSLN. In some embodiments, the third domain comprises a CDR1 comprising an amino acid sequence selected from the group consisting of SEQ ID NOS: 490-528, a CDR2 comprising an amino acid selected from the group consisting of SEQ ID NOS: 529-567, and a CDR3 comprising an amino acid selected from the group consisting of SEQ ID NOS: 568-606. In some embodiments, the CDR1 comprises the amino acid sequence of SEQ ID NO: 523, the CDR2 comprises the amino acid of SEQ ID NO: 562, the CDR3 comprises the amino acid sequence of SEQ ID NO: 601. In some embodiments, the third domain comprises an amino acid sequence selected from the group consisting of SEQ ID NOS: 607-650. In some embodiments, the third domain comprises the amino acid sequence of SEQ ID NO: 647. In some embodiments, the half-life extended immune cell engaging protein comprises an amino acid sequence of SEQ ID NO: 3856-3858.

[0017] In some embodiments, the third domain is a single domain antibody that specifically binds to BCMA. In some embodiments, the third domain CDR1 comprises comprising an amino acid selected from the group consisting of SEQ ID NOS: 1-115, a CDR2 comprising an amino acid selected from the group consisting of SEQ ID NOS: 116-230, and a CDR3 comprising an amino acid selected from the group consisting of SEQ ID NOS: 231-345. In some embodiments, the CDR1 comprises the amino acid sequence of SEQ ID NO: 73, the CDR2 comprises the amino acid of SEQ ID NO: 188, the CDR3 comprises the amino acid sequence of SEQ ID NO: 303. In some embodiments, the third domain comprises an amino acid sequence selected from the group consisting of SEQ ID NOS: 346-461. In some embodiments, the third domain comprises the amino acid sequence of SEQ ID NO: 383.

[0018] In some embodiments, the third domain is a single domain antibody that specifically binds to DLL3. In some embodiments, the third domain comprises a CDR1 comprising an amino acid selected from the group consisting of SEQ ID NOS: 1751-2193, a CDR2 comprising an amino acid selected from the group consisting of SEQ ID NOS: 2194-2636, and a CDR3 comprising an amino acid selected from the group consisting of SEQ ID NOS: 2637-3080. In some embodiments, the CDR1 comprises the amino acid sequence of SEQ ID NO: 2182, the CDR2 comprises the amino acid of SEQ ID NO: 2625, the CDR3 comprises the amino acid sequence of SEQ ID NO: 3069. In some embodiments, the third domain comprises an amino acid sequence selected from the group consisting of SEQ ID NOS: 1308-1750. In some embodiments, the third domain comprises the amino acid sequence of SEQ ID NO: 1739.

[0019] In some embodiments, the third domain is a single domain antibody that specifically binds to EGFR. In some embodiments, the third domain comprises a CDR1 comprising an amino acid selected from the group consisting of SEQ ID NOS: 651-699, a CDR2 comprising an amino acid selected from the group consisting of SEQ ID NOS: 700-748, a CDR3 comprising an amino acid selected from the group consisting of SEQ ID NOS: 479-797. In some embodiments, the third domain comprises an amino acid sequence selected from the group consisting of SEQ ID NOS: 798-846.

[0020] In some embodiments, the third domain is a single domain antibody that specifically binds to EpCAM. In some embodiments, the third domain comprises a CDR1 comprising an amino acid selected from the group consisting of SEQ ID NOS: 847-884, a CDR2 comprising an amino acid selected from the group consisting of SEQ ID NOS: 885-922, a CDR3 comprising an amino acid selected from the group consisting of SEQ ID NOS: 923-960. In some embodiments, the CDR1 comprises the amino acid sequence of SEQ ID NO: 874 or 863, the CDR2 comprises the amino acid of SEQ ID NO: 885 or 901, the CDR3 comprises the amino acid sequence of SEQ ID NO: 923 or 939. In some embodiments, the third domain comprises a sequence selected from the group consisting of SEQ ID NOS: 961-1003. In some embodiments, the third domain comprises the amino acid sequence of SEQ ID NO: 999 or 1003.

[0021] In some embodiments, the first domain comprises a single-chain variable fragment (scFv) specific to human CD3. In some embodiments, the scFv specific to human CD3 comprises a variable heavy chain region (VH), a variable light chain region (VL), and a linker, wherein VH comprises complementarity determining regions HC CDR1, HC CDR2, and HC CDR3, and wherein VL comprises complementarity determining regions LC CDR1, LC CDR2, and LC CDR3. In some embodiments, the HC CDR1 comprises an amino acid sequence selected from the group consisting of SEQ ID NOS: 3081, and 3087-3098, the HC CDR2 comprises an amino acid sequence selected from the group consisting of SEQ ID NOS: 3082, and 3099-3109, the HC CDR3 comprises an amino acid sequence selected from the group consisting of SEQ ID NOS: 3083, and 3110-3119. In some embodiments, the HC CDR1 comprises the amino acid sequence of SEQ ID NO: 3097, the HC CDR2 comprises the amino acid sequence of SEQ ID NO: 3108, the HC CDR3 comprises the amino acid sequence of SEQ ID NO: 3110. In some embodiments, the LC CDR1 comprises an amino acid sequence selected from the group consisting of SEQ ID NOS: 3084, and 3120-3132, the LC CDR2 comprises an amino acid sequence selected from the group consisting of SEQ ID NOS: 3085, and 3099-3109, the LC CDR3 comprises an amino acid sequence selected from the group consisting of SEQ ID NOS: 3086, and 3146-3152. In some embodiments, the LC CDR1 comprises the amino acid sequence of SEQ ID NO: 3120, the LC CDR2 comprises the amino acid sequence of SEQ ID NO: 3145, the LC CDR3 comprises the amino acid sequence of SEQ ID NO: 3146. In some embodiments, the first domain comprises an amino acid sequence selected from the group consisting of SEQ ID NOS: 3153-3169. In some embodiments, the first domain comprises the amino acid sequence of SEQ ID NO: 3153. In some embodiments, the linker comprises an amino acid sequence GGGGSGGGGSGGGGS (SEQ ID NO: 3868).

[0022] In some embodiments, the second domain comprises a single domain antibody (sdAb) which specifically binds to HSA. In some embodiments, the sdAb which specifically binds to HSA comprises complementarity determining regions CDR1, CDR2, and CDR3, wherein the CDR1 comprises an amino acid sequence selected from the group consisting of SEQ ID NOS: 3170, and 3173-3175, the CDR2 comprises an amino acid sequence selected from the group consisting of SEQ ID NOS: 3171, and 3176-3181, the CDR3 comprises an amino acid sequence selected from the group consisting of SEQ ID NOS: 3172, and 8182-3183. In some embodiments, the CDR1 comprises an amino acid sequence of SEQ ID NO: 3174, the CDR2 comprises an amino acid of SEQ ID NO: 3178, the CDR3 comprises an amino acid sequence of SEQ ID NO: 3183. In some embodiments, the second domain comprises an amino acid sequence selected from the group consisting of SEQ ID NOS: 3184-3193. In some embodiments, the second domain comprises the amino acid sequence of SEQ ID NO: 3190. In some embodiments, linkers L1 and L2 are each, independently, (GS)ₙ (SEQ ID NO: 3859), (GGS)ₙ (SEQ ID NO: 3860), (GGGS)ₙ (SEQ ID NO: 3861), (GGSG)ₙ (SEQ ID NO: 3862), (GGSGG)ₙ (SEQ ID NO: 3863), (GGGGS)ₙ (SEQ ID NO: 3864), (GGGGG)ₙ (SEQ ID NO: 3865), or (GGG)ₙ (SEQ ID NO: 3866), wherein n is 1, 2, 3, 4, 5, 6, 7, 8, 9, or 10, (GGGGSGGGGSGGGGSGGGGS)(SEQ ID NO: 3867), (GGGGSGGGGSGGGGS) (SEQ ID NO: 3868), LPETG (SEQ ID NO: 3869), (GGGGSGGGS) (SEQ ID NO: 3871) or SGGG (SEQ ID NO: 3872). In some embodiments, linkers L1 and L2 are each, independently, GGGGSGGGS (SEQ ID NO: 3871).

[0023] Provided herein is method for the treatment or amelioration of a disease comprising administrating to a subject in need thereof a pharmaceutical composition according to the description herein. In some embodiments, the disease is a cancer. Provided herein is method for increasing survival in a subject suffering from a cancer, the method comprising administering to the subject a pharmaceutical composition according to the description herein. Provided herein is method of reducing tumor size, the method comprising administering to a subject from a cancer a pharmaceutical composition according to the description herein. In some embodiments, the cancer is selected from the group consisting of: mesothelioma, a prostate cancer, a breast cancer, a brain cancer, a bladder cancer, a pancreatic carcinoma, a renal cancer, a solid tumor, a liver cancer, a leiomyosarcoma, an endometrium cancer, a breast cancer, a female reproductive system cancer, an ovarian carcinoma, a soft tissue sarcoma, a gastric cancer, a digestive/gastrointestinal cancer, a colorectal cancer, a glioblastoma multiforme, a head and neck cancer, a squamous cell carcinoma, a colon cancer, a gastric cancer, a rhabdomyosarcoma, an adrenal cancer, a lung cancer, an esophageal cancer, a colon cancer, a lung cancer, a non-small cell lung carcinoma (NSCLC), a neuroblastoma, a melanoma, glioblastoma multiforme, an ovarian cancer, an endocrine cancer, a respiratory/thoracic cancer, an anal cancer, a gastro-esophageal cancer, a thyroid cancer, a cervical cancer, an endometrial cancer, a hematological cancer, a leukemia, a lymphocytic leukemia, a multiple myeloma, a lymphoma, a Hodgkin's lymphoma, a non-Hodgkin's lymphoma, a lymphocytic leukemia, an anaplastic large-cell lymphoma (ALCL), or a myeloid leukemia. In some embodiments, the cancer is the prostate cancer. In some embodiments, the cancer is the ovarian carcinoma. In some embodiments, the cancer is the pancreatic carcinoma. In some embodiments, the cancer is the mesothelioma. In some embodiments, the cancer is the lung cancer.

[0024] Provided herein is a pharmaceutical composition comprising an extended-release binding protein which comprises an antigen binding protein, a masking peptide, and a cleavable linker, wherein upon administering to a subject, the extended-release binding protein gradually releases an active version of the extended-release binding protein when the cleavable linker is cleaved in systemic circulation. In some embodiments, the antigen binding protein comprises an antigen binding domain that binds to a target antigen. In some embodiments, the masking peptide inhibits or reduces the binding of the antigen binding protein to the target antigen. In some embodiments, the antigen binding protein comprises an immune cell engaging domain. In some embodiments, the immune cell engaging domain comprises a T cell engaging domain. In some embodiments, the T cell engaging domain binds a CD3 molecule. In some embodiments, the masking peptide inhibits or reduces the binding of the antigen binding protein to the CD3 molecule. In some embodiments, the antigen binding protein comprises a half-life extension domain. In some embodiments, the half-life extension domain binds a human serum albumin (HSA). In some embodiments, the cleavable linker comprises a cleavage site. In some embodiments, the cleavable site is recognized by a protease. In some embodiments, wherein the masking peptide is covalently linked to the N-terminus or the C-terminus of the antigen binding protein through the cleavable linker.

[0025] Provided herein is a method of making an extended-release binding protein comprising adding a cleavable linker and a masking peptide to an antigen binding protein, wherein upon administering to a subject, the extended-release binding protein gradually releases an active version of the extended-release binding protein when the cleavable linker is cleaved in systemic circulation. In some embodiments, the antigen binding protein comprises an antigen binding domain that binds to a target antigen. In some embodiments, the masking peptide inhibits or reduces the binding of the antigen binding protein to the target antigen. In some embodiments, the antigen binding protein comprises an immune cell engaging domain. In some embodiments, the immune cell engaging domain comprises a T cell engaging domain. In some embodiments, the T cell engaging domain binds a CD3 molecule. In some embodiments, the masking peptide inhibits or reduces the binding of the antigen binding protein to the CD3 molecule. In some embodiments, the antigen binding protein comprises a half-life extension domain. In some embodiments, the half-life extension domain binds a human serum albumin (HSA). In some embodiments, the cleavable linker comprises a cleavage site. In some embodiments, the cleavable site is recognized by a protease. In some embodiments, the masking peptide is covalently linked to the N-terminus or the C-terminus of the antigen binding protein through the cleavable linker.

[0026] Provided herein is a method of increasing the therapeutic index of an antigen binding protein, comprising adding a cleavable linker and a masking peptide to the antigen binding protein to form an extended-release binding protein, wherein upon administering to a subject, the extended-release binding protein gradually releases an active version of the extended-release binding protein when the cleavable linker is cleaved in systemic circulation. Provided herein is method of decreasing the CRS level in a subject, comprising adding a cleavable linker and a masking peptide to an antigen binding protein to form an extended-release binding protein, wherein upon administering to the subject, the extended-release binding protein gradually releases an active version of the extended-release binding protein when the cleavable linker is cleaved in systemic circulation. Provided herein is method of gradually increase an active drug's concentration in a subject's systemic circulation comprising administering an extended-release binding protein to the subject, wherein the extended-release binding protein comprises an antigen binding protein, a masking peptide, and a cleavable linker, wherein the extended-release binding protein releases the active drug upon cleavage of the cleavable linker in systemic circulation.

[0027] Provided herein is a pharmaceutical composition comprising a protein which comprises a binding moiety, a masking peptide, and a cleavable linker, wherein the masking peptide is covalently linked to the binding moiety through the cleavable linker, and wherein the cleavable linker is significantly cleaved in systemic circulation.

[0028] Provided herein is a pharmaceutical composition comprising a protein which comprises a binding moiety, a masking peptide, and a cleavable linker, wherein the masking peptide is covalently linked to the binding moiety through the cleavable linker, and wherein a half-life of the protein in systemic circulation is longer than a comparable protein without the masking peptide.

[0029] Provided herein is a pharmaceutical composition comprising a protein which comprises a binding moiety, a masking peptide, and a cleavable linker, wherein the masking peptide is covalently linked to the binding moiety through the cleavable linker, and wherein a comparable protein without the masking peptide has a nonlinear pharmacokinetics (PK) across a dose range evaluated, and wherein the protein has an improved linearity of PK across the dose range evaluated compared to the comparable protein.

[0030] Provided herein is a pharmaceutical composition comprising a protein which comprises a binding moiety, a masking peptide, and a cleavable linker, wherein the masking peptide is covalently linked to the binding moiety through the cleavable linker, wherein the binding moiety specifically binds to a target in a subject, and wherein a molar amount of the protein's binding moiety bound to the target when administered to the subject is lower compared to a molar amount of a binding moiety of a comparable protein without the masking peptide when administered to the subject at a same dose level.

[0031] Provided herein is a pharmaceutical composition comprising a protein which comprises a binding moiety, a masking peptide, and a cleavable linker, wherein the masking peptide is covalently linked to the binding moiety through the cleavable linker, wherein the binding moiety specifically binds to a target in a subject, and wherein a first binding rate between the protein's binding moiety and the target when administered to the subject is lower compared to a second binding rate between a binding moiety of a comparable protein without the masking peptide and the target.

[0032] In some embodiments, the binding moiety specifically binds to ICOS (inducible T cell co-stimulator, CD278), OX40 (CD134, TNFRSF4, tumor necrosis factor receptor superfamily member 4), CD40 (TNFRSF5, tumor necrosis factor receptor superfamily member 5), DR5 (death receptor 5, TRAIL receptor 2), GITR (glucocorticoid-induced TNFR-related protein, TNFRSF18, tumor necrosis factor receptor superfamily member 18), 4-1BB (CD137, TNFRSF9, tumor necrosis factor receptor superfamily member 9) or any combinations thereof. In some embodiments, the protein comprises an antibody selected from the group consisting of GSK3359609, PF-8600, JNJ-64457107, CP-870,893, SGN-40 (Dacetuzumab), MEDI3039, ABBV-621, MEDI1873, AMG 228, PF-05082566 (Utomilumab), and urelumab.

[0033] Provided herein is a method of treating or ameliorating a disease comprising administrating to a subject in need thereof a pharmaceutical composition described herein.

### BRIEF DESCRIPTION OF THE DRAWINGS

[0034] The novel features of the invention are set forth with particularity in the appended claims. A better understanding of the features and advantages of the present invention will be obtained by reference to the following detailed description that sets forth illustrative embodiments, in which the principles of the invention are utilized, and the accompanying drawings of which:

[0035] FIG. 1A shows an exemplary construct of an extended-release binding protein. FIG. 1B shows an exemplary construct of the active version of the extended-release binding protein. FIG. 1C shows the predicted concentrations of the intact version and the active version in systemic circulation after multiple administration events. FIG. 1D shows the predicted concentration of the active version of a corresponding antigen binding protein without the masking peptide in systemic circulation after multiple administration events.

[0036] FIGS. 2A-L illustrates additional extended-release binding protein constructs with various configurations of the anti-target, anti-albumin and anti-CD3 binding domains. FIG. 2A illustrates an intact version of an extended-release binding protein construct. FIG. 2B illustrate an intact version of an extended-release binding protein construct. FIG. 2C illustrate an intact version of an extended-release binding protein construct. FIG. 2G illustrate an intact version of an extended-release binding protein construct. FIG. 2H illustrate an intact version of an extended-release binding protein construct. FIG. 2I illustrate an intact version of an extended-release binding protein construct. FIG. 2D illustrates an active version after cleavage of the linker that contain linker amino acids left after protease cleavage (as described herein, these remaining amino acids are referred to as “stub”). FIG. 2E illustrates an active version after cleavage of the linker that contain stub. FIG. 2F illustrates an active version after cleavage of the linker that contain stub. FIG. 2J illustrates an active version after cleavage of the linker that contain stub. FIG. 2K illustrates an active version after cleavage of the linker that contain stub. FIG. 2L illustrates an active version after cleavage of the linker that contain stub.

[0037] FIG. 3 Analytical cation exchange chromatography demonstrates the purity of three PSMA binding proteins.

[0038] FIG. 4 demonstrates slow activation of peptide masked PSMA targeting extended-release binding proteins in TDCC assay measured in the presence of HSA.

[0039] FIG. 5 demonstrates the masking effects of various peptide masks engineered into PSMA binding proteins measured in the presence of HSA.

[0040] FIGS. 6A-B demonstrates the masking effects of various peptide masks engineered into MSLN binding proteins.

[0041] FIG. 7 demonstrates the TDCC assay results of various CD19 targeting proteins measured in the presence of HSA.

[0042] FIG. 8 demonstrates the TDCC assay results of various FLT3 targeting proteins measured in the presence of HSA.

[0043] FIG. 9 demonstrates the TDCC assay results of various FLT3 targeting protein measured in the presence of HSA.

[0044] FIG. 10 demonstrates the TDCC assay results of various CD33 targeting proteins measured in the presence of HSA.

[0045] FIG. 11 demonstrates the TDCC assay results of CD19 targeting proteins in the T:C:A or T:A:C configuration measured in the presence of HSA.

[0046] FIG. 12 demonstrates the TDCC assay results of FLT3 targeting proteins in the T:C:A configuration measured in the presence of HSA.

[0047] FIG. 13A illustrates the binding of TriTAC-XR non-cleavable prodrug, cleavable prodrug, and active drug to human CD3ε by ELISA. FIG. 13B illustrates the binding of TriTAC-XR non-cleavable prodrug, cleavable prodrug, and active drug to human T cells as measured by flow cytometry.

[0048] FIG. 14A illustrates the pharmacokinetics of FLT3 TriTAC-XR-L001 in cynomolgus monkeys after single i.v. doses of 300. FIG. 14B illustrates the pharmacokinetics of FLT3 TriTAC-XR-L001 in cynomolgus monkeys after single i.v. doses of 1000 μg/kg. FIG. 14C illustrates the pharmacokinetics of FLT3 TriTAC-XR-L085 after a single i.v. doses of 1000 μg/kg. Two assays were used to quantify the Intact, Active, and Total amount of TriTAC-XR. Plotted are mean values measured in plasma samples collected from two test subjects per dose group.

[0049] FIG. 15 illustrates the amount of soluble FLT3L present in serum samples collected from cynomolgus monkeys after single i.v. doses of FLT3 TriTAC-XR-L001 (SEQ ID NO: 3873) or TriTAC-XR-L085 (SEQ ID NO: 3874). Data are plotted each individual test subject in each dose group.

[0050] FIG. 16 illustrates the amount of FLT3 transcript present in RNA prepared from bone marrow collected from cynomolgus monkeys after single i.v. doses of FLT3 TriTAC-XR-L001 (SEQ ID NO: 3873) or TriTAC-XR-L085 (SEQ ID NO: 3874). Plotted are technical replicates. Data are plotted each individual test subject in each dose group.

[0051] FIG. 17 illustrates the pharmacokinetics of FLT3 TriTAC-XR-L001 (SEQ ID NO: 3873) or a constitutively active FLT3 TriTAC (SEQ ID NO: 3875) in non-human primates (NHP).

[0052] FIG. 18 illustrates the amount of FLT3 transcript present in RNA prepared from bone marrow collected from cynomolgus monkeys after single i.v. doses of 1000 μg/kg FLT3 TriTAC-XR-L001 (SEQ ID NO: 3873) or a constitutively active FLT3 TriTAC (SEQ ID NO: 3875). Plotted are technical replicates. Data are plotted each individual test subject in each dose group.

[0053] FIG. 19 illustrates the predicted pharmacokinetics of repeat dosing of TriTAC-XR or TriTAC in NHP.

[0054] FIG. 20 shows the empirical pharmacokinetics of repeat dosing of CD20 TriTAC-XR in cyno monkeys.

[0055] FIG. 21A illustrates the peak IL-2 level after i.v. dosing of FLT3 TriTAC-XR (FLT3 TriTAC-XR-L001, SEQ ID NO: 3873) at 300 and 1000 μg/kg or a constitutively active FLT3 TriTAC (SEQ ID NO: 3875) at 10, 100, and 1000 μg/kg. Plotted are mean values measured in serum samples collected from two test subjects per dose group. FIG. 21B illustrates the peak IL-6 level after i.v. dosing of FLT3 TriTAC-XR (FLT3 TriTAC-XR-L001, SEQ ID NO: 3873) at 300 and 1000 μg/kg or a constitutively active FLT3 TriTAC (SEQ ID NO: 3875) at 10, 100, and 1000 μg/kg. Plotted are mean values measured in serum samples collected from two test subjects per dose group.

[0056] FIG. 22 illustrates the amount of soluble FLT3L present in serum samples collected from cynomolgus monkeys after single i.v. doses of FLT3 TriTAC-XR-L001 (SEQ ID NO: 3873) at 300 and 1000 μg/kg, or a constitutively active FLT3 TriTAC (SEQ ID NO: 3875) at 10, 100 and 1000 μg/kg. Plotted are mean values measured in serum samples collected from two test subjects per dose group.

[0057] FIG. 23 illustrates the efficacy of an a FLT3 TriTAC-XR in a mouse tumor model.

[0058] FIG. 24 illustrates the pharmacokinetics of CD19 TriTAC-XR or a constitutively active CD19 TriTAC in NHP.

[0059] FIG. 25A illustrates the peak IL-2 level after i.v. dosing of CD19 TriTAC-XR or a constitutively active CD19 TriTAC. FIG. 25B illustrates the peak IL-6 level after i.v. dosing of CD19 TriTAC-XR or a constitutively active CD19 TriTAC.

[0060] FIG. 26 illustrates that target cell depletion is comparable between CD19 TriTAC and CD19 TriTAC-XR.

[0061] FIG. 27 illustrates the pharmacokinetics of CD20 TriTAC-XR or a constitutively active CD20 TriTAC in NHP.

[0062] FIG. 28A illustrates the peak IL-2 level after i.v. dosing of CD20 TriTAC-XR or a constitutively active CD20 TriTAC. FIG. 28B illustrates the peak IL-6 level after i.v. dosing of CD20 TriTAC-XR or a constitutively active CD20 TriTAC.

[0063] FIG. 29 illustrates that target cell depletion is comparable between CD20 TriTAC and CD20 TriTAC-XR.

[0064] FIG. 30 illustrates exemplary constructs of a protein with masking peptide as described herein.

### DETAILED DESCRIPTION OF THE INVENTION

### Certain Definitions

[0065] The terminology used herein is for the purpose of describing particular cases only and is not intended to be limiting. As used herein, the singular forms “a”, “an” and “the” are intended to include the plural forms as well, unless the context clearly indicates otherwise. Furthermore, to the extent that the terms “including”, “includes”, “having”, “has”, “with”, or variants thereof are used in either the detailed description and/or the claims, such terms are intended to be inclusive in a manner similar to the term “comprising.”

[0066] The term “about” or “approximately” means within an acceptable error range for the particular value as determined by one of ordinary skill in the art, which will depend in part on how the value is measured or determined, e.g., the limitations of the measurement system. For example, “about” can mean within 1 or more than 1 standard deviation, per the practice in the given value. Where particular values are described in the application and claims, unless otherwise stated the term “about” should be assumed to mean an acceptable error range for the particular value.

[0067] The terms “individual,” “patient,” or “subject” are used interchangeably. None of the terms require or are limited to situation characterized by the supervision (e.g. constant or intermittent) of a health care worker (e.g. a doctor, a registered nurse, a nurse practitioner, a physician's assistant, an orderly, or a hospice worker).

[0068] An “antibody” typically refers to a Y-shaped tetrameric protein comprising two heavy (H) and two light (L) polypeptide chains held together by covalent disulfide bonds and non-covalent interactions. Human light chains comprise a variable domain (VL) and a constant domain (CL) wherein the constant domain may be readily classified as kappa or lambda based on amino acid sequence and gene loci. Each heavy chain comprises one variable domain (VH) and a constant region, which in the case of IgG, IgA, and IgD, comprises three domains termed CH1, CH2, and CH3 (IgM and IgE have a fourth domain, CH4). In IgG, IgA, and IgD classes the CH1 and CH2 domains are separated by a flexible hinge region, which is a proline and cysteine rich segment of variable length (generally from about 10 to about 60 amino acids in IgG). The variable domains in both the light and heavy chains are joined to the constant domains by a “J” region of about 12 or more amino acids and the heavy chain also has a “D” region of about 10 additional amino acids. Each class of antibody further comprises inter-chain and intra-chain disulfide bonds formed by paired cysteine residues. There are two types of native disulfide bridges or bonds in immunoglobulin molecules: interchain and intrachain disulfide bonds. The location and number of interchain disulfide bonds vary according to the immunoglobulin class and species. Interchain disulfide bonds are located on the surface of the immunoglobulin, are accessible to solvent and are usually relatively easily reduced. In the human IgG1 isotype there are four interchain disulfide bonds, one from each heavy chain to the light chain and two between the heavy chains. The interchain disulfide bonds are not required for chain association. As is well known the cysteine rich IgG1 hinge region of the heavy chain has generally been held to consist of three parts: an upper hinge, a core hinge, and a lower hinge. Those skilled in the art will appreciate that that the IgG1 hinge region contain the cysteines in the heavy chain that comprise the interchain disulfide bonds (two heavy/heavy, two heavy/light), which provide structural flexibility that facilitates Fab movements. The interchain disulfide bond between the light and heavy chain of IgG1 are formed between C214 of the kappa or lambda light chain and C220 in the upper hinge region of the heavy chain. The interchain disulfide bonds between the heavy chains are at positions C226 and C229 (all numbered per the EU index according to Kabat, et al., infra.)

[0069] As used herein the term “antibody” includes polyclonal antibodies, multiclonal antibodies, monoclonal antibodies, chimeric antibodies, deimmunized, humanized and primatized antibodies, CDR grafted antibodies, human antibodies, recombinantly produced antibodies, intrabodies, multispecific antibodies, bispecific antibodies, monovalent antibodies (e.g., a monovalent IgG), multivalent antibodies, anti-idiotypic antibodies, synthetic antibodies, including muteins and variants thereof, immunospecific antibody fragments such as: hcIgG, a V-NAR, Fv, Fd, Fab, F(ab′)2, F(ab′), Fab2, Fab3 fragments, single-chain fragments (e.g., di-scFv, scFv, scFvFc, scFv-zipper, scFab), disulfide-linked Fvs (sdFv), a Fd fragment consisting of the VH and CH1 domains, linear antibodies, single domain antibodies such as nanobodies or single variable domain antibodies comprising merely one variable domain such as sdAb (VH, VL, or VHH domains), “r IgG” (“half antibody”), diabodies, single chain diabodies, tandem diabodies (Tandab's), tandem di-scFv, tandem tri-scFv, “minibodies” are in some instances exemplified by a structure which is as follows: (VH-VL-CH3)2, (scFv-CH3)2, ((scFv)2-CH3+CH3), ((scFv)2-CH3) or (scFv-CH3-scFv)2, multibodies such as triabodies or tetrabodies; and derivatives thereof including Fc fusions and other modifications, and any other immunoreactive molecule so long as it comprises a domain having a binding site for preferential association or binding with an FLT3protein. Moreover, unless dictated otherwise by contextual constraints the term further comprises all classes of antibodies (i.e. IgA, IgD, IgE, IgG, and IgM) and all subclasses (i.e., IgG1, IgG2, IgG3, IgG4, IgA1, and IgA2). Heavy-chain constant domains that correspond to the different classes of antibodies are typically denoted by the corresponding lower case Greek letter alpha, delta, epsilon, gamma, and mu, respectively. Light chains of the antibodies from any vertebrate species can be assigned to one of two clearly distinct types, called kappa (kappa) and lambda (lambda), based on the amino acid sequences of their constant domains.

[0070] As used herein, “Variable region” or “variable domain” refers to the fact that certain portions of the variable domains differ extensively in sequence among antibodies and are used in the binding and specificity of each particular antibody for its particular antigen. However, the variability is not evenly distributed throughout the variable domains of antibodies. It is concentrated in three segments called complementarity-determining regions (CDRs) or hypervariable regions both in the light-chain and the heavy-chain variable domains. The more highly conserved portions of variable domains are called the framework (FR). The variable domains of native heavy and light chains each comprise four FR regions, largely adopting a n-sheet configuration, connected by three CDRs, which form loops connecting, and in some cases forming part of, the βsheet structure. The CDRs in each chain are held together in close proximity by the FR regions and, with the CDRs from the other chain, contribute to the formation of the antigen-binding site of antibodies (see Kabat et al., Sequences of Proteins of Immunological Interest, Fifth Edition, National Institute of Health, Bethesda, Md. (1991)). The constant domains are not involved directly in binding an antibody to an antigen, but exhibit various effector functions, such as participation of the antibody in antibody-dependent cellular toxicity. The assignment of amino acids to each domain, framework region and CDR is, in some embodiments, in accordance with one of the numbering schemes provided by Kabat et al. (1991) Sequences of Proteins of Immunological Interest (5th Ed.), US Dept. of Health and Human Services, PHS, NIH, NIH Publication NO: 91-3242; Chothia et al., 1987, PMID: 3681981; Chothia et al., 1989, PMID: 2687698; MacCallum et al., 1996, PMID: 8876650; or Dubel, Ed. (2007) Handbook of Therapeutic Antibodies, 3rd Ed., Wily-VCH Verlag GmbH and Co or AbM (Oxford Molecular/MSI Pharmacopeia) unless otherwise noted.

[0071] “Variable domain residue numbering as in Kabat” or “amino acid position numbering as in Kabat,” and variations thereof, refers to the numbering system used for heavy chain variable domains or light chain variable domains of the compilation of antibodies in Kabat et al., Sequences of Proteins of Immunological Interest, 5th Ed. Public Health Service, National Institutes of Health, Bethesda, Md. (1991). Using this numbering system, the actual linear amino acid sequence may contain fewer or additional amino acids corresponding to a shortening of, or insertion into, a FR or CDR of the variable domain. For example, a heavy chain variable domain may include a single amino acid insert (residue 52a according to Kabat) after residue 52 of H2 and inserted residues (e.g., residues 82a, 82b, and 82c, etc. according to Kabat) after heavy chain FR residue 82. The Kabat numbering of residues may be determined for a given antibody by alignment at regions of homology of the sequence of the antibody with a “standard” Kabat numbered sequence. It is not intended that CDRs of the present disclosure necessarily correspond to the Kabat numbering convention.

[0072] The term “Framework” or “FR” residues (or regions) refer to variable domain residues other than the CDR or hypervariable region residues as herein defined. A “human consensus framework” is a framework which represents the most commonly occurring amino acid residue in a selection of human immunoglobulin VL or VH framework sequences.

[0073] The term “epitope,” as used herein, refers to an antigenic determinant that interacts with a specific antigen binding site in the variable region of an antibody molecule known as a paratope. A single antigen may have more than one epitope. Thus, different antibodies may bind to different areas on an antigen and may have different biological effects. Epitopes may be either conformational or linear. A conformational epitope is produced by spatially juxtaposed amino acids from different segments of the linear polypeptide chain. A linear epitope is one produced by adjacent amino acid residues in a polypeptide chain. In certain circumstance, an epitope may include moieties of saccharides, phosphoryl groups, or sulfonyl groups on the antigen.

[0074] As used herein, the term “Percent (%) amino acid sequence identity” with respect to a sequence is defined as the percentage of amino acid residues in a candidate sequence that are identical with the amino acid residues in the specific sequence, after aligning the sequences and introducing gaps, if necessary, to achieve the maximum percent sequence identity, and not considering any conservative substitutions as part of the sequence identity. Alignment for purposes of determining percent amino acid sequence identity can be achieved in various ways that are within the skill in the art, for instance, using publicly available computer softwares such as EMBOSS MATCHER, EMBOSS WATER, EMBOSS STRETCHER, EMBOSS NEEDLE, EMBOSS LALIGN, BLAST, BLAST-2, ALIGN or Megalign (DNASTAR) software. Those skilled in the art can determine appropriate parameters for measuring alignment, including any algorithms needed to achieve maximal alignment over the full length of the sequences being compared. Alignment for purposes of determining percent amino acid sequence identity can for example be achieved using publicly available sequence comparison computer program ALIGN-2. The source code for the ALIGN-2 sequence comparison computer program is available with user documentation in the U.S. Copyright Office, Washington D.C., 20559, where it is registered under U.S. Copyright Registration NO: TXU510087. The ALIGN-2 program can be compiled for use on a UNIX operating system, such as a digital UNIX V4.0D. All sequence comparison parameters are set by the ALIGN-2 program and do not vary.

[0075] As used herein, “elimination half-time” is used in its ordinary sense, as is described in Goodman and Gillman's The Pharmaceutical Basis of Therapeutics 21-25 (Alfred Goodman Gilman, Louis S. Goodman, and Alfred Gilman, eds., 6th ed. 1980). Briefly, the term is meant to encompass a quantitative measure of the time course of drug elimination. The elimination of most drugs is exponential (i.e., follows first-order kinetics), since drug concentrations usually do not approach those required for saturation of the elimination process. The rate of an exponential process may be expressed by its rate constant, k, which expresses the fractional change per unit of time, or by its half-time, t_{1/2} the time required for 50% completion of the process. The units of these two constants are time-1 and time, respectively. A first-order rate constant and the half-time of the reaction are simply related (k×t_{1/2}=0.693) and may be interchanged accordingly. Since first-order elimination kinetics dictates that a constant fraction of drug is lost per unit time, a plot of the log of drug concentration versus time is linear at all times following the initial distribution phase (i.e., after drug absorption and distribution are complete). The half-time for drug elimination can be accurately determined from such a graph.

[0076] As used herein, the term “binding affinity” refers to the affinity of the proteins described in the disclosure to their binding targets, and is expressed numerically using “Kd” values. If two or more proteins are indicated to have comparable binding affinities towards their binding targets, then the Kd values for binding of the respective proteins towards their binding targets, are within ±2-fold of each other. If two or more proteins are indicated to have comparable binding affinities towards single binding target, then the Kd values for binding of the respective proteins towards said single binding target, are within ±2-fold of each other. If a protein is indicated to bind two or more targets with comparable binding affinities, then the Kd values for binding of said protein to the two or more targets are within ±2-fold of each other. In general, a higher Kd value corresponds to a weaker binding. In some embodiments, the “Kd” is measured by a radiolabeled antigen binding assay (RIA) or surface plasmon resonance assays using a BIAcore™-2000 or a BIAcore™-3000 (BIAcore, Inc., Piscataway, N.J.). In certain embodiments, an “on-rate” or “rate of association” or “association rate” or “kon” and an “off-rate” or “rate of dissociation” or “dissociation rate” or “koff” are also determined with the surface plasmon resonance technique using a BIAcore™-2000 or a BIAcore™-3000 (BIAcore, Inc., Piscataway, N.J.). In additional embodiments, the “Kd”, “kon”, and “koff” are measured using the OCTET® Systems (Pall Life Sciences). In an exemplary method for measuring binding affinity using the OCTET® Systems, the ligand, e.g. biotinylated human or cynomolgus FLT3 in case of an immune cell engaging protein comprising a FLT3 binding single domain antibody, is immobilized on the OCTET® streptavidin capillary sensor tip surface which streptavidin tips are then activated according to manufacturer's instructions using about 20-50 μg/ml human or cynomolgus FLT3 protein. A solution of PBS/Casein is also introduced as a blocking agent. For association kinetic measurements, FLT3 binding protein variants are introduced at a concentration ranging from about 10 ng/mL to about 100 μg/mL, about 50 ng/mL to about 5 μg/mL, or about 2 ng/mL to about 20 μg/mL. In some embodiments, the FLT3 binding single domain proteins are used at a concentration ranging from about 2 ng/mL to about 20 μg/mL. Complete dissociation is observed in case of the negative control, assay buffer without the binding proteins. The kinetic parameters of the binding reactions are then determined using an appropriate tool, e.g., ForteBio software.

[0077] As used herein, in some embodiments, “treatment” or “treating” or “treated” refers to therapeutic treatment wherein the object is to slow (lessen) an undesired physiological condition, disorder or disease, or to obtain beneficial or desired clinical results. For the purposes described herein, beneficial or desired clinical results include, but are not limited to, alleviation of symptoms; diminishment of the extent of the condition, disorder or disease; stabilization (i.e., not worsening) of the state of the condition, disorder or disease; delay in onset or slowing of the progression of the condition, disorder or disease; amelioration of the condition, disorder or disease state; and remission (whether partial or total), whether detectable or undetectable, or enhancement or improvement of the condition, disorder or disease. Treatment includes eliciting a clinically significant response without excessive levels of side effects. Treatment also includes prolonging survival as compared to expected survival if not receiving treatment. In other embodiments, “treatment” or “treating” or “treated” refers to prophylactic measures, wherein the object is to delay onset of or reduce severity of an undesired physiological condition, disorder or disease, such as, for example is a person who is predisposed to a disease (e.g., an individual who carries a genetic marker for a disease such as breast cancer).

[0078] Generally, it should be noted that the term single domain antibody as used herein in its broadest sense is not limited to a specific biological source or to a specific method of preparation. Single domain antibodies are antibodies whose complementary determining regions are part of a single domain polypeptide. Examples include, but are not limited to, heavy chain antibodies, antibodies naturally devoid of light chains, single domain antibodies derived from conventional 4-chain antibodies, engineered antibodies and single domain scaffolds other than those derived from antibodies. Single domain antibodies may be any of the art, or any future single domain antibodies. Single domain antibodies may be derived from any species including, but not limited to mouse, human, camel, llama, goat, rabbit, bovine. For example, in some embodiments, the single domain antibodies of the disclosure are obtained: (1) by isolating the VHH domain of a naturally occurring heavy chain antibody; (2) by expression of a nucleotide sequence encoding a naturally occurring VHH domain; (3) by “humanization” of a naturally occurring VHH domain or by expression of a nucleic acid encoding a such humanized VHH domain; (4) by “camelization” of a naturally occurring VH domain from any animal species, and in particular from a species of mammal, such as from a human being, or by expression of a nucleic acid encoding such a camelized VH domain; (5) by “camelization” of a “domain antibody” or “Dab,” or by expression of a nucleic acid encoding such a camelized VH domain; (6) by using synthetic or semi-synthetic techniques for preparing proteins, polypeptides or other amino acid sequences; (7) by preparing a nucleic acid encoding a single domain antibody using techniques for nucleic acid synthesis known in the field, followed by expression of the nucleic acid thus obtained; and/or (8) by any combination of one or more of the foregoing.

[0079] In some embodiments, an immune cell engaging protein as described herein comprises an antibody, e.g., a single domain antibody targeting an antigen, e.g., PSMA, MSLN, BCMA, DLL3, EGFR, EpCAM, FLT3, comprising an amino acid sequence that corresponds to the amino acid sequence of a naturally occurring VHH domain, but that has been “humanized”, e.g., by replacing one or more amino acid residues in the amino acid sequence of said naturally occurring VHH sequence (and in particular in the framework sequences) by one or more of the amino acid residues that occur at the corresponding position(s) in a VH domain from a conventional 4-chain antibody from a human being (e.g., as indicated above). This can be performed in a manner known in the field, which will be clear to the skilled person, for example on the basis of the further description herein. Again, it should be noted that such humanized single domain antibodies of the disclosure are obtained in any suitable manner known per se (e.g., as indicated under points (1)-(8) above) and thus are not strictly limited to polypeptides that have been obtained using a polypeptide that comprises a naturally occurring VHH domain as a starting material. In some additional embodiments, a single domain antibody, as described herein, comprises a single domain antibody with an amino acid sequence that corresponds to the amino acid sequence of a naturally occurring VH domain, but that has been “camelized”, i.e., by replacing one or more amino acid residues in the amino acid sequence of a naturally occurring VH domain from a conventional 4-chain antibody by one or more of the amino acid residues that occur at the corresponding position(s) in a VHH domain of a heavy chain antibody. Such “camelizing” substitutions are preferably inserted at amino acid positions that form and/or are present at the VH-VL interface, and/or at the so-called Camelidae hallmark residues (see for example WO 94/04678 and Davies and Riechmann (1994 and 1996)). Preferably, the VH sequence that is used as a starting material or starting point for generating or designing the camelized single domain is preferably a VH sequence from a mammal, more preferably the VH sequence of a human being, such as a VH3 sequence. However, it should be noted that such camelized anti-MSLN single domain antibodies of the disclosure, in certain embodiments, are obtained in any suitable manner known in the field (i.e., as indicated under points (1)-(8) above) and thus are not strictly limited to polypeptides that have been obtained using a polypeptide that comprises a naturally occurring VH domain as a starting material. For example, as further described herein, both “humanization” and “camelization” is performed by providing a nucleotide sequence that encodes a naturally occurring VHH domain or VH domain, respectively, and then changing, one or more codons in said nucleotide sequence in such a way that the new nucleotide sequence encodes a “humanized” or “camelized” single domain antibody, respectively. This nucleic acid can then be expressed, so as to provide a desired single domain antibody of the disclosure. Alternatively, in other embodiments, based on the amino acid sequence of a naturally occurring VHH domain or VH domain, respectively, the amino acid sequence of the desired humanized or camelized single domain antibody of the disclosure, respectively, are designed and then synthesized de novo using known techniques for peptide synthesis. In some embodiments, based on the amino acid sequence or nucleotide sequence of a naturally occurring VHH domain or VH domain, respectively, a nucleotide sequence encoding the desired humanized or camelized single domain antibody of the disclosure, respectively, is designed and then synthesized de novo using known techniques for nucleic acid synthesis, after which the nucleic acid thus obtained is expressed in using known expression techniques, so as to provide the desired single domain antibody of the disclosure.

[0080] The terms “patient” or “subject” refers to any single subject for which therapy is desired or that is participating in a clinical trial, epidemiological study or used as a control, including humans and mammalian veterinary patients such as cattle, horses, dogs, and cats.

[0081] The term “therapeutic index” is the ratio of the TD₅₀ (or LD₅₀) to the ED₅₀, determined from quantal dose-response curves. ED₅₀ is the efficacious dose of a drug in 50% of subjects. TD₅₀ is the toxic dose of a drug in 50% of subjects for humans. LD₅₀ is the lethal dose of a drug for 50% of the population for animals. Therapeutic index demonstrates a quantitative measurement of the relative safety of the drug. A higher therapeutic index is preferable to a lower one: a patient would have to take a much higher dose of such a drug to reach the toxic threshold than the dose taken to elicit the therapeutic effect.

[0082] The term “significantly cleaved” means that a molecule is cleaved for more than 25%, 30%, 35%, 40%, 45%, 50%, 55%, 60%, 65%, 70%, 75%, 80%, 85%, 90%, 95% or 99%.

### Extended-Release Binding Protein

[0083] Described herein is a pharmaceutical composition comprising an extended-release binding protein which comprises an antigen binding protein/immune cell engaging protein, a masking peptide, and a cleavable linker, wherein the extended-release binding protein releases an active version of the extended-release binding protein after the cleavable linker is cleaved.

[0084] Without being bound by any theory, it is contemplated that the masking peptide, connected to the antigen binding protein/immune cell engaging protein via a cleavable linker, confers extended-release properties to the antigen binding protein/immune cell engaging protein. The extended-release binding protein is converted to an active form upon gradual cleaving of the cleavable linker, which removes the masking effect of the masking peptide, and releases the active form. The gradual release of the active form from the masked form (intact form) allows maintenance of a steady concentration of the active form for a longer duration of time, compared to directly administering the non-masked form. The extended-release binding protein is contemplated to have a higher therapeutic index than a corresponding antigen binding protein without the masking peptide. FIG. 1C shows the predicted concentrations of the intact version and the active version in systemic circulation after multiple administration events. FIG. 1D shows the predicted concentration of the active version of a corresponding antigen binding protein without the masking peptide in systemic circulation after multiple administration events. The concentration of the extended-release binding protein's active version is relatively constant compared to the concentration of the active version for a corresponding antigen binding protein without the masking peptide.

[0085] Cytokine release syndrome (CRS) is the major dose limiting toxicity, it is hypothesized that there are two factors contributing to CRS: 1) instant exposure to a high concentration of the active drug, and 2) exposures of the active drug that greatly exceed Cmin. The extended-release concept addresses both issues by having a slow initial release of active drug and by minimizing the difference between Cmax and Cmin. It is expected that relatively constant concentrations of the active drug in the serum result in relatively constant drug exposures to the tissues. Therefore, administration of the extended-release binding protein results in a lower Cytokine release syndrome (CRS) level than the CRS observed when a corresponding antigen binding protein without the masking peptide is administered.

[0086] In some embodiments, the masking peptide is linked to the N-terminus or the C-terminus of the antigen binding protein/immune cell engaging protein, through a cleavable linker. Various exemplary configurations are provided in FIGS. 2A through 2L. In some embodiments, the masking peptide is linked to the N-terminus of the domain that specifically binds to HSA, wherein the domain that specifically binds to HSA is connected, via its C-terminus (e.g., through a linker) to the target antigen binding domain or the T-cell engaging domain. In some embodiments, the masking peptide is linked to the N-terminus of the target antigen binding domain, wherein the target antigen binding domain is connected, via its C-terminus (e.g., through a linker) to the domain that specifically binds to HSA or the T-cell engaging domain. In some embodiments, the masking peptide is linked to the C-terminus of the target antigen binding domain, wherein the target antigen binding domain is connected, via its N-terminus (e.g., through a linker) to the domain that specifically binds to HSA or the T-cell engaging domain. In some embodiments, the masking peptide is linked to the N-terminus of the T-cell engaging domain. In some embodiments, the masking peptide is linked to the C-terminus of the T-cell engaging domain. In some embodiments, the masking peptide is linked to the VH or VL domain of a T-cell engaging domain that is a single chain variable fragment (e.g., an scFv that is specific for a human CD3, such as CD3E). Alternative formats include, but are not limited to an extended-release binding protein comprising, from N-terminus to C-terminus:
[0087] a masking peptide-a cleavable linker-a target antigen binding domain-a serum albumin binding domain-a T-cell engaging domain;
[0088] a masking peptide-a cleavable linker-a target antigen binding domain-a T-cell engaging domain-a serum albumin binding domain;
[0089] a masking peptide-a cleavable linker-a T-cell engaging domain-a serum albumin binding domain-a target antigen binding domain;
[0090] a masking peptide-a cleavable linker-a T-cell engaging domain-a target antigen binding domain-a serum albumin binding domain;
[0091] a masking peptide-a cleavable linker-a serum albumin binding domain-a T-cell engaging domain-a target antigen binding domain;
[0092] a masking peptide-a cleavable linker-a serum albumin binding domain-a target antigen binding domain-a T-cell engaging domain;
[0093] a target antigen binding domain-a serum albumin binding domain-a T-cell engaging domain-a cleavable linker-a masking peptide;
[0094] a target antigen binding domain-a T-cell engaging domain-a serum albumin binding domain-a cleavable linker-a masking peptide;
[0095] a T-cell engaging domain-a serum albumin binding domain-a target antigen binding domain-a cleavable linker-a masking peptide;
[0096] a T-cell engaging domain-a target antigen binding domain-a serum albumin binding domain-a cleavable linker-a masking peptide;
[0097] a serum albumin binding domain-a T-cell engaging domain-a target antigen binding domain-a cleavable linker-a masking peptide;
[0098] a serum albumin binding domain-a target antigen binding domain-a T-cell engaging domain-a cleavable linker-a masking peptide.

[0099] The antigen binding protein/extended-release immune cell engaging protein of this disclosure, in some embodiments, comprises an amino acid sequence that is at least about 60% to about 100% identical to the sequence of SEQ ID NO: 3600, 3824-3858 or 3882.

### Immune Cell Engaging Proteins

[0100] Described herein, in some embodiments, is a pharmaceutical composition comprising an extended-release binding protein which comprises an immune cell engaging protein, a masking peptide, and a cleavable linker. In some embodiments, the immune cell engaging protein is a half-life extended protein. In some embodiments, the masking peptide is covalently linked to the N-terminus or the C-terminus of the half-life extended immune cell engaging protein through the cleavable linker. In some embodiments, the cleavable linker is significantly cleaved in systemic circulation. In some embodiments, the immune cell engaging protein is a bi-specific protein, a tri-specific protein or a multi-specific protein. In some embodiments, the immune cell engaging protein comprises a domain that binds to a bulk serum protein, e.g., a serum albumin. In some embodiments, the serum albumin is human serum albumin (HSA).

[0101] In some embodiments, the extended-release binding protein has a higher therapeutic index than a corresponding half-life-extended immune cell engaging protein without the masking peptide. In some embodiments, the administration of the extended-release binding protein results in a lower Cmax/Cmin ratio of an active version of the extended-release binding protein in systemic circulation than the Cmax/Cmin ratio when a corresponding half-life extended immune cell engaging protein without the masking peptide is administered. In some embodiments, multiple administration of the extended-release binding protein results in a more gradual increase of the level of an active version of the extended-release binding protein in systemic circulation than when a corresponding half-life-extended immune cell engaging protein without the masking peptide is administered. In some embodiments, administration of the extended-release binding protein results in a lower Cytokine release syndrome (CRS) level than the CRS observed when a corresponding half-life extended immune cell engaging protein without the masking peptide is administered.

[0102] In some embodiments, the immune cell engaging protein comprises an immune cell engaging domain. In some embodiments “an immune cell engaging domain” as used herein refers to one or more binding specificities that bind and/or activate an immune cell, e.g., a cell involved in an immune response. In some embodiments, the immune cell is selected from a natural killer (NK) cell, a B cell, a dendritic cell, a macrophage cell. The immune cell engaging domain, in some embodiments, is an antibody or an antigen binding fragment thereof, a receptor molecule (e.g., a full length receptor, receptor fragment, or fusion thereof (e.g., a receptor-Fc fusion)), or a ligand molecule (e.g., a full length ligand, ligand fragment, or fusion thereof (e.g., a ligand-Fc fusion)) that binds to an immune cell antigen (e.g., the NK cell antigen, the B cell antigen, the dendritic cell antigen, and/or the macrophage cell antigen). In some embodiments, the immune cell engaging domain specifically binds to a target immune cell, e.g., binds preferentially to the target immune cell. For example, in some embodiments the immune cell engaging domain is an antibody or an antigen binding fragment thereof that binds to the immune cell antigen (e.g., the NK cell antigen, the B cell antigen, the dendritic cell antigen, and/or the macrophage cell antigen) with a dissociation constant of less than about 10 nM.

[0103] In some embodiments, the immune cell engaging domain comprises an NK cell engaging domain, a T cell engaging domain, a B cell engaging domain, a dendritic cell engaging domain, a macrophage cell engaging domain, or a combination thereof. In some embodiments, the immune cell engaging domain comprises the T-cell engaging domain. In some embodiments, the T cell engaging domain binds a CD3 molecule. In some embodiments, the CD3 molecule is at least one of: a CD3γ molecule, a CD3δ molecule, or a CD3ε molecule.

[0104] In some embodiments, the immune cell engaging protein comprises an antigen binding domain. In some examples, the antigen binding domain includes antibodies, single chain antibodies, Fabs, Fv, T-cell receptor binding domains, ligand binding domains, receptor binding domains, domain antibodies, single domain antibodies, minibodies, nanobodies, peptibodies, or various other antibody mimics (such as affimers, affitins, alphabodies, atrimers, CTLA4-based molecules, adnectins, anticalins, Kunitz domain-based proteins, avimers, knottins, fynomers, darpins, affibodies, affilins, monobodies and armadillo repeat protein-based proteins).

[0105] In some embodiments, the antigen is a tumor antigen, In some embodiments, the antigen is selected from the group consisting of: CD19 (B-lymphocyte antigen CD19, B-Lymphocyte Surface Antigen B4, T-Cell Surface Antigen Leu-12, CVID3), PSMA (prostate specific membrane antigen), MSLN (mesothelin), BCMA (B-cell maturation antigen), DLL3 (Delta-like ligand 3), EGFR (epidermal growth factor receptor), FLT3 (FMS-like tyrosine kinase 3), CD20 (B-lymphocyte antigen CD20, MS4A1, B1, Bp35, CVID5, LEU-16, MS4A2, S7, membrane spanning 4-domains A1), CD22 (SIGLEC-2, SIGLEC2), CD25 (IL2RA, interleulin-2 receptor alpha chain), CD27 (S152, S152. LPFS2, T14, TNFRSF7, Tp55), CD30 (TNFRSF8), CD33 (Siglec-3, sialic acid binding Ig-like lectin 3, SIGLEC3, SIGLEC-3, gp67, p67), CD37 (GP52-40, TSPAN26), CD38 (cyclic ADP ribose hydrolase, ADPRC1, ADPRC 1), CD40 (Bp50, CDW40, TNFRSF5, p50), CD44 (HCAM, homing cell adhesion molecule), Pgp-1 (phagocytic glycoprotein-1), Hermes antigen, lymphocyte homing receptor, ECM-III, and HUTCH-1), CD48 (BLAST-1, B-lymphocyte activation marker, SLAMF2, signaling lymphocytic activation molecule 2), CD52 (CAMPATH-1 antigen), CD70, CD73 (NT5E, ecto-5′-nucleotidase), CD39 (ENTPD1, Ectonucleoside triphosphate diphosphohydrolase-1), CD74 (HLA class II histocompatibility antigen gamma chain, HLA-DR antigens-associated invariant chain), CD79b (immunoglobulin-associated beta), CD80 (B7-1), CD86 (B7-2), CD123 (IL3RA, interleukin-3 receptor), CD133 (PROM1), CD137 (TNFRSF9, tumor necrosis factor receptor superfamily member 9, 4-1BB, ILA, induced by lymphocyte activation), CD138 (SDC1), alpha fetoprotein (AFP), c-Met; c-Kit; CD371 (CLEC12A, C-type lectin domain family 12 member A, CLL1)); CD370 (CLEC9A, C-type lectin domain containing 9A); cadherin 3 (CDH3, p-cadherin, PCAD); carbonic anhydrase 6 (CA6); carbonic anhydrase 9 (CA9, CA1X); carcinoembryonic antigen related cell adhesion molecule 3 (CEACAM3); carcinoembryonic antigen related cell adhesion molecule 5 (CEACAM5); CD66c (CEACAM6, carcinoembryonic antigen related cell adhesion molecule 6); chorionic somatomammotropin hormone 1 (CSH1, CS1); coagulation factor III, tissue factor (F3, TF); collectin subfamily member 10 (COLEC10); delta like canonical Notch ligand 3 (DLL3); ectonucleotide pyrophosphatase/phosphodiesterase 3 (ENPP3); ephrin A1 (EFNA1); epidermal growth factor receptor (EGFR); EGFR variant III (EGFRvIII); EPH receptor A2 (EPHA2); epithelial cell adhesion molecule (EpCAM); erb-b2 receptor tyrosine kinase 2 (ERBB2, HER2); fibroblast activation protein alpha (FAP); fibroblast growth factor receptor 2 (FGFR2); fibroblast growth factor receptor 3 (FGFR3); folate hydrolase 1 (FOLH1, PSMA); folate receptor 1 (FOLR1, FRa); GD2 ganglioside; glycoprotein NMB (GPNMB, osteoactivin); guanylate cyclase 2C (GUCY2C, GCC); human papillomavirus (HPV) E6; HPV E7; major histocompatibility complex (MHC) class I-presented neoantigens, major histocompatibility complex (MHC) class II-presented neoantigens, major histocompatibility complex, class I, E (HLA-E); major histocompatibility complex, class I, F (HLA-F); major histocompatibility complex, class I, G (HLA-G, MHC-G); integrin subunit beta 7 (ITGB7); leukocyte immunoglobulin like receptor B1 (LILRB1, ILT2); leukocyte immunoglobulin like receptor B2 (LILRB2, ILT4); LY6/PLAUR domain containing 3 (LYPD3, C4.4A); glypican 3 (GPC3); KRAS proto-oncogene, GTPase (KRAS); MAGE family member A1 (MAGEA1); MAGE family member A3 (MAGEA3); MAGE family member A4 (MAGEA4); MAGE family member A11 (MAGEA11); MAGE family member C1 (MAGEC1); MAGE family member C2 (MAGEC2); MAGE family member D1 (MAGED1); MAGE family member D2 (MAGED2); mesothelin (MSLN); mucin 1 (MUC1) and splice variants thereof (e.g., MUC1/C, D, and Z); mucin 16 (MUC16); necdin (NDN); nectin cell adhesion molecule 4 (NECTIN4); SLIT and NTRK like family member 6 (SLITRK6); promyelocytic leukemia (PML, TRIM19); protein tyrosine kinase 7 (inactive) (PTK7); CD352 (SLAMF6, SLAM family member 6); CD319 (SLAMF7, SLAM family member 7, 19A, CRACC, CS1); sialic acid binding Ig like lectin 7 (SIGLEC7); sialic acid binding Ig like lectin 9 (SIGLEC9); solute carrier family 34 (sodium phosphate), member 2 (SLC34A2); solute carrier family 39 member 6 (SLC39A6, LIV1); STEAP family member 1 (STEAP1); STEAP family member 2 (STEAP2); CD134 (TNFRSF4, TNF receptor superfamily member 4, OX40); CD137L (TNFSF9, TNF superfamily member 9, 4-1BB-L); CD261 (TNFRSF10A, TNF receptor superfamily member 10a, DR4, TRAILR1); CD262 (TNFRSF10B, TNF receptor superfamily member 10b, DR5, TRAILR2); CD267 (TNFRSF13B, TNF receptor superfamily member 13B, TACI, IGAD2); CD269 (TNFRSF17, TNF receptor superfamily member 17, BCMA); CD357 (TNFRSF18, TNF receptor superfamily member 18 GITR); transferrin (TF); transforming growth factor beta 1 (TGFB1); trophoblast glycoprotein (TPBG, 5T4); trophinin (TRO, MAGED3); tumor associated calcium signal transducer 2 (TACSTD2, TROP2, EGP1); Fucosyl GM1; sialyl Lewis adhesion molecule (sLe); ROR1, CD30, and Lewis Y antigen. In some embodiments, the immune cell engaging protein specifically binds to PSMA, MSLN, BCMA, DLL3, EGFR, FLT3, or EpCAM.

[0106] Described herein, in some embodiments, is an immune cell engaging protein that comprises a first domain (A), which is a T cell engaging domain and specifically binds to human CD3, a second domain (B) which specifically binds to human serum albumin (HSA), and a third domain (C) which specifically binds to a target antigen. In some embodiments, the immune cell engaging protein's domains are linked in one of the following orders: H₂N-(C)-(B)-(A)-COOH, H₂N-(A)-(B)-(C)-COOH, H₂N-(B)-(A)-(C)-COOH, H₂N-(C)-(A)-(B)-COOH, H₂N-(A)-(C)-(B)-COOH, H₂N-(B)-(C)-(A)-COOH, or by linkers L1 and L2 in one of the following orders: H₂N-(C)-L1-(B)-L2(A)-COOH, H₂N-(A)-L1-(B)-L2-(C)-COOH, H₂N-(B)-L1-(A)-L2-(C)-COOH, H₂N-(C)-L1-(A)-L2-(B)-COOH, H₂N-(A)-L1-(C)-L2(B)-COOH, H₂N-(B)-L1-(C)-L2-(A)-COOH. In some embodiments, the linkers L1 and L2 are each independently selected from an amino acid sequence of SEQ ID NOS: 3190-3200.

[0107] The design of the immune cell engaging proteins described herein allows the binding domain to a target antigen, the third domain (C) described above, to be flexible in that the binding domain to a target antigen can be any type of binding domain, including but not limited to, domains from a monoclonal antibody, a polyclonal antibody, a recombinant antibody, a human antibody, or a humanized antibody. In some embodiments, the binding domain to a target antigen is a single chain variable fragments (scFv), single-domain antibody such as a heavy chain variable domain (VH), a light chain variable domain (VL), a variable domain (VHH) of a llama derived sdAb, or a variable domain (VHH) of camelid derived single domain antibody. In other embodiments, the binding domain to a target antigen is a non-Ig binding domain, e.g., antibody mimetic, such as anticalins, affilins, affibody molecules, affimers, affitins, alphabodies, avimers, DARPins, fynomers, kunitz domain peptides, and monobodies. In further embodiments, the binding domain to a target antigen is a ligand or peptide that binds to or associates with the target antigen. In yet further embodiments, the binding domain to a target antigen is a knottin. In yet further embodiments, the binding domain to a target antigen is a small molecular entity.

[0108] In some embodiments, the target antigen binding domain is an antibody or an antibody variant. As used herein, the term “antibody variant” refers to variants and derivatives of an antibody described herein. In certain embodiments, amino acid sequence variants of the antibodies described herein are contemplated. For example, in certain embodiments amino acid sequence variants of antibodies described herein are contemplated to improve the binding affinity and/or other biological properties of the antibodies. Exemplary methods for preparing amino acid variants include, but are not limited to, introducing appropriate modifications into the nucleotide sequence encoding the antibody, or by peptide synthesis. Such modifications include, for example, deletions from, and/or insertions into and/or substitutions of residues within the amino acid sequences of the antibody.

[0109] Any combination of deletion, insertion, and substitution can be made to arrive at the final construct, provided that the final construct possesses the desired characteristics, e.g., antigen-binding. In certain embodiments, antibody variants having one or more amino acid substitutions are provided. Sites of interest for substitution mutagenesis include the CDRs and framework regions. Examples of such substitutions are described below. Amino acid substitutions may be introduced into an antibody of interest and the products screened for a desired activity, e.g., retained/improved antigen binding, decreased immunogenicity, or improved T-cell mediated cytotoxicity (TDCC). Both conservative and non-conservative amino acid substitutions are contemplated for preparing the antibody variants.

[0110] In another example of a substitution to create a variant antibody, one or more hypervariable region residues of a parent antibody are substituted. In general, variants are then selected based on improvements in desired properties compared to a parent antibody, for example, increased affinity, reduced affinity, reduced immunogenicity, or increased pH dependence of binding.

[0111] In one embodiment, a single domain antibody corresponds to the VHH domains of naturally occurring heavy chain antibodies directed against a target antigen. As further described herein, such VHH sequences can generally be generated or obtained by suitably immunizing a species of Llama with the target antigen, (i.e., so as to raise an immune response and/or heavy chain antibodies directed against the target antigen), by obtaining a suitable biological sample from said Llama (such as a blood sample, serum sample or sample of B-cells), and by generating VHH sequences directed against the target antigen, starting from said sample, using any suitable technique known in the field.

[0112] In another embodiment, such naturally occurring VHH domains against the target antigen, are obtained from naïve libraries of Camelid VHH sequences, for example by screening such a library using the target antigen, or at least one part, fragment, antigenic determinant or epitope thereof using one or more screening techniques known in the field. Such libraries and techniques are for example described in WO 99/37681, WO 01/90190, WO 03/025020 and WO 03/035694. Alternatively, improved synthetic or semi-synthetic libraries derived from naïve VHH libraries are used, such as VHH libraries obtained from naïve VHH libraries by techniques such as random mutagenesis and/or CDR shuffling, as for example described in WO 00/43507.

[0113] In a further embodiment, yet another technique for obtaining VHH sequences directed against a target antigen, involves suitably immunizing a transgenic mammal that is capable of expressing heavy chain antibodies (i.e., so as to raise an immune response and/or heavy chain antibodies directed against the target antigen), obtaining a suitable biological sample from said transgenic mammal (such as a blood sample, serum sample or sample of B-cells), and then generating VHH sequences directed against the target antigen, starting from said sample, using any suitable technique known in the field. For example, for this purpose, the heavy chain antibody-expressing rats or mice and the further methods and techniques described in WO 02/085945 and in WO 04/049794 can be used.

[0114] In some embodiments, a single domain antibody of the target antigen specific immune cell engaging protein comprises a single domain antibody with an amino acid sequence that corresponds to the amino acid sequence of a naturally occurring VHH domain, but that has been “humanized”, i.e., by replacing one or more amino acid residues in the amino acid sequence of said naturally occurring VHH sequence (and in particular in the framework sequences) by one or more of the amino acid residues that occur at the corresponding position(s) in a VH domain from a conventional 4-chain antibody from a human being (e.g., as indicated above).

[0115] Other suitable methods and techniques for obtaining a target antigen binding single domain antibody of the disclosure and/or nucleic acids encoding the same, starting from naturally occurring VH sequences or VHH sequences for example comprises combining one or more parts of one or more naturally occurring VH sequences (such as one or more framework (FR) sequences and/or complementarity determining region (CDR) sequences), one or more parts of one or more naturally occurring VHH sequences (such as one or more FR sequences or CDR sequences), and/or one or more synthetic or semi-synthetic sequences, in a suitable manner, so as to provide a target antigen binding single domain antibody of the disclosure or a nucleotide sequence or nucleic acid encoding the same.

[0116] In some embodiments, the target antigen binding domain is an antibody comprising a heavy chain variable complementarity determining region CDR1, a heavy chain variable CDR2, a heavy chain variable CDR3, a light chain variable CDR1, a light chain variable CDR2, and a light chain variable CDR3. In some embodiments, examples of the target antigen binding domain include but are not limited to domains from a monoclonal antibody, a polyclonal antibody, a recombinant antibody, a human antibody, a humanized antibody, or antigen binding fragments such as single domain antibodies (sdAb), Fab, Fab′, F(ab)2, and Fv fragments, fragments comprised of one or more CDRs, single-chain antibodies (e.g., single chain Fv fragments (scFv)), disulfide stabilized (dsFv) Fv fragments, heteroconjugate antibodies (e.g., bispecific antibodies), pFv fragments, heavy chain monomers or dimers, light chain monomers or dimers, and dimers consisting of one heavy chain and one light chain. In some embodiments, the target antigen binding domain is a single domain antibody. In some embodiments, the single domain antibody comprises heavy chain variable complementarity determining regions (CDR), CDR1, CDR2, and CDR3.

[0117] In some embodiments, the immune cell engaging protein comprising the target antigen binding domain specifically binds to the target with equivalent or better affinity compared to that of an immune cell engaging protein comprising a reference target antigen binding domain, and the target antigen binding domain in such embodiments comprises an affinity matured target antigen binding domain, and is derived from a parental molecule, comprising one or more amino acid mutations (e.g., a stabilizing mutation, or a destabilizing mutation) with respect to the parental molecule. In some embodiments, the affinity matured target antigen binding molecule has superior stability with respect to selected destabilizing agents, as that of a reference parental molecule specific to the same antigen. In some embodiments, the affinity matured target antigen binding molecule is identified in a process comprising panning of one or more pre-candidate target antigen binding molecules derived from one or more parental molecule, expressed in a phage display library, against a target protein. The pre-candidate target antigen binding molecule comprises, in some embodiments, amino acid substitutions in the variable regions, CDRs, or framework residues, relative to a parental molecule.

[0118] As used herein, “Phage display” refers to a technique by which variant polypeptides are displayed as fusion proteins to at least a portion of a coat protein on the surface of phage, e.g., filamentous phage, particles. A utility of phage display lies in the fact that large libraries of randomized protein variants can be rapidly and efficiently selected for those sequences that bind to a target molecule with high affinity. Display of peptide and protein libraries on phage has been used for screening millions of polypeptides for ones with specific binding properties. Polyvalent phage display methods have been used for displaying small random peptides and small proteins through fusions to either gene III or gene VIII of filamentous phage. See e.g. Wells and Lowman, Curr. Opin. Struct. Biol, 3:355-362 (1992), and references cited therein. In monovalent phage display, a protein or peptide library is fused to a gene III or a portion thereof, and expressed at low levels in the presence of wild type gene III protein so that phage particles display one copy or none of the fusion proteins. Avidity effects are reduced relative to polyvalent phage so that selection is on the basis of intrinsic ligand affinity, and phagemid vectors are used, which simplify DNA manipulations. See e.g., Lowman and Wells, Methods: A companion to Methods in Enzymology, 3:205-0216 (1991).

[0119] In some embodiments, the panning comprises using varying binding times and concentrations to identify target antigen binding molecules with increased or decreased on-rates, from pre-candidate target antigen binding molecules. In some embodiments, the panning comprises using varying wash times to identify target antigen binding molecules with increased or decreased off-rates, from pre-candidate target antigen molecules. In some embodiments, the panning comprises using both varying binding times and varying wash times. In some embodiments, one or more stabilizing mutations are combined to increase the stability of the affinity matured target antigen binding molecule, for example, by shuffling to create a second-stage combinatorial library from such mutants and conducting a second round of panning followed by a binding selection.

[0120] In some embodiments, the affinity matured target antigen binding molecule comprises an equivalent or better affinity to a target antigen protein (such as human target antigen protein) as that of a target antigen binding parental molecule, but that has reduced cross reactivity, or in some embodiments, increased cross reactivity, with selected substances, such as ligands, proteins, antigens, or the like, other than the target antigen epitope for which the target antigen binding parental molecule is specific, or is designed to be specific for. In regard to the latter, an affinity matured target antigen binding molecule, in some embodiments, is more successfully tested in animal models if the affinity matured target antigen binding molecule is reacted with both human target and the corresponding target of the animal model, e.g. mouse target or cynomolgus target. In some embodiments, the parental target antigen binding molecule binds to human target antigen with an affinity of about 500 nM or less, 400 nM or less, 300 nM or less, 200 nM or less, 100 nM or less, 50 nM or less, 10 nM or less, and to cynomolgus EpCAM with an affinity of about 500 nM or less, 400 nM or less, 300 nM or less, 200 nM or less, 100 nM or less, 50 nM or less, 15 nM or less, or 10 nM or less. In some embodiments, the affinity matured target antigen binding molecule, identified after one round of panning, binds to human target antigen with an affinity of about 5 nM or less, such as 1 nM or less, and to cynomolgus target antigen with an affinity of about 7.5 nM or less, such as 1 nM or less. In some embodiments, the affinity matured target antigen binding molecule, identified after two rounds of panning, binds to human target antigen with an affinity of about 2.5 nM or less, and to cynomolgus target antigen with an affinity of about 3.5 nM or less.

[0121] In some embodiments, the domains of the immune cell engaging protein are linked by one or more internal linkers. In certain embodiments, the internal linkers are “short,” i.e., consist of 0, 1, 2, 3, 4, 5, 6, 7, 8, 9, 10, 11 or 12 amino acid residues. Thus, in certain instances, the internal linkers consist of about 12 or less amino acid residues. In the case of 0 amino acid residues, the internal linker is a peptide bond. In certain embodiments, the internal linkers are “long,” i.e., consist of 15 to 25 amino acid residues. In some embodiments, the internal linkers consist of about 3 to about 15, for example 8, 9 or 10 contiguous amino acid residues. Regarding the amino acid composition of the internal linkers, peptides are selected with properties that confer flexibility to the target antigen binding proteins, do not interfere with the binding domains as well as resist cleavage from proteases. For example, glycine and serine residues generally provide protease resistance. Examples of internal linkers suitable for linking the domains in the target antigen binding proteins include but are not limited to (GS)ₙ (SEQ ID NO: 3859), (GGS)ₙ (SEQ ID NO: 3860), (GGGS)ₙ (SEQ ID NO: 3861), (GGSG)ₙ (SEQ ID NO: 3862), (GGSGG)ₙ (SEQ ID NO: 3863), (GGGGS)ₙ (SEQ ID NO: 3864), (GGGGG)ₙ (SEQ ID NO: 3865), or (GGG)ₙ (SEQ ID NO: 3866), wherein n is 1, 2, 3, 4, 5, 6, 7, 8, 9, or 10. In one embodiment, the linker is (GGGGSGGGGSGGGGSGGGGS)(SEQ ID NO: 3867), (GGGGSGGGGSGGGGS) (SEQ ID NO: 3868), LPETG (SEQ ID NO: 3869), (GGGGSGGGS) (SEQ ID NO: 3871) or SGGG (SEQ ID NO: 3872).

[0122] In some embodiments, the immune cell engaging protein described herein comprise a polypeptide having a sequence described in SEQ ID NOS: 3218-3462 and subsequences thereof. In some embodiments, the immune cell engaging protein comprises a polypeptide having at least 70%-95% or more identity to a sequence described in SEQ ID NO: 3218-3462. In some embodiments, the immune cell engaging protein comprises a polypeptide having at least 70%, 75%, 80%, 85%, 90%, 95%, 96%, 97%, 98%, 99%, or more identity to a sequence described in SEQ ID NO: 3218-3462. In some embodiments, the immune cell engaging protein has a sequence comprising at least a portion of a sequence described in SEQ ID NO: 3218-3462. In some embodiments, the immune cell engaging protein comprises a polypeptide comprising one or more of the sequences described in SEQ ID NO: 3218-3462.

[0123] In some embodiments, the immune cell engaging protein described herein comprise a polypeptide having a sequence described in SEQ ID NOS: 3255, 3340, 3376, and 3462 and subsequences thereof. In some embodiments, the immune cell engaging protein comprises a polypeptide having at least 70%-95% or more identity to a sequence described in SEQ ID NO: 3255, 3340, 3376, and 3462. In some embodiments, the immune cell engaging protein comprises a polypeptide having at least 70%, 75%, 80%, 85%, 90%, 95%, 96%, 97%, 98%, 99%, or more identity to a sequence described in SEQ ID NO: 3255, 3340, 3376, and 3462. In some embodiments, the immune cell engaging protein has a sequence comprising at least a portion of a sequence described in SEQ ID NO: 3255, 3340, 3376, and 3462. In some embodiments, the immune cell engaging protein comprises a polypeptide comprising one or more of the sequences described in SEQ ID NO: 3255, 3340, 3376, and 3462.

### CD19 Binding Domain

[0124] Described herein are immune cell engaging proteins that comprise a CD19 binding domain as the target antigen binding domain, pharmaceutical compositions thereof, as well as nucleic acids, recombinant expression vectors and host cells for making such proteins thereof. Also provided are methods of using the disclosed proteins comprising a CD19 binding domain of this disclosure, in the prevention, and/or treatment of diseases, conditions and disorders.

[0125] The CD19 binding domain, in some embodiments, are specific for CD19 expressed on cell surface. The anti-CD19 antibodies disclosed herein, in some instances, show high binding affinity to CD19 (e.g., cell-surface CD19), high stability, and/or bind to different CD19 epitopes compared to FMC63, which is an anti-CD19 scFv. CD19 is a 95 kDa transmembrane glycoprotein expressed primarily on B lineage cells and follicular dendritic cells. It is a member of the immunoglobulin super family. CD19 molecules from various species are well known in the art. For example, the amino acid sequence of human CD19 can be found under GenBank accession NO: AAA69966. CD19 plays essential roles in B cell malignancies and autoimmunity. CD19 is reported to be expressed on the surface of cancer cells in 90% of acute lymphoblastic leukemia (ALL) patients, as well as on cancer cells of B-cell non-Hodgkin's lymphoma (NHL) and chronic lymphocytic leukemia (CLL) patients. Therefore, CD19 has been considered as a promising target for immunotherapy of cancers of B cell lineage. See, e.g., Stanciu-Herrera et al., Leuk Res. 2008; 32:625-32; and Le Gall et al., FEBS Lett. 1999; 453:164-8.

[0126] In some embodiments, the CD19 binding domain comprises a sequence that is at least about 70% to about 99% or more identical to a sequence selected from the group consisting of SEQ ID NOS: 3771-3792. In some embodiments, the CD19 binding domain comprises a sequence that is at least about 70%, 75%, 80%, 85%, 90%, 95%, 96%, 97%, 98%, 99%, or 100% identical to a sequence selected from the group consisting of SEQ ID NOS: 3771-3792. In some embodiments, the CD19 binding domain comprises a sequence selected from the group consisting of SEQ ID NOS: 3771-3792.

### CD20 Binding Domain

[0127] Described herein are immune cell engaging proteins that comprise a CD20 binding domain as the target antigen binding domain, pharmaceutical compositions thereof, as well as nucleic acids, recombinant expression vectors and host cells for making such proteins thereof. Also provided are methods of using the disclosed proteins comprising a CD20 binding domain of this disclosure, in the prevention, and/or treatment of diseases, conditions and disorders.

[0128] CD20 molecule is a non-glycosylated phosphoprotein specifically labeled on the surface of human lymphocyte subgroup (B cell group). It consists of 297 amino acids with a molecular weight of 33-37 kDa, and is expressed on the surface of more than 95% of B cells. CD20 molecule exists in both normal B cells and malignant cells, and is especially expressed in more than 90% of B-cell non-Hodgkin's lymphoma. The CD20 molecule has four transmembrane regions, and the amino terminus and the carboxy terminus are located on the inner side of the plasma membrane. Between the third transmembrane region and the fourth transmembrane region, there is a loop region composed of 43 amino acid residues, which constitutes the main epitope. The CD20 antigen molecule is relatively exposed and accessible. When CD20 is close to each other under the action of antibodies, the polymer formed by cross-linking or even super-crosslinking functions as a calcium ion channel, allowing extracellular calcium ions to flow into the cells; in addition, the tyrosine protein kinases of the Src family activate each other due to proximity. Signaling pathways are initiated and endogenous calcium stores are mobilized, both of which lead to an increase in intracellular calcium ion concentration and then affect the operation of cell cycle, regulate cell proliferation and differentiation and even lead to the occurrence of apoptosis. Although the actual role of CD20 in promoting the proliferation and differentiation of B cells is not clear, CD20 provides an important target for antibody-mediated therapy, which can be used for controlling the B cells involved in cancers and autoimmune diseases.

[0129] In some embodiments, the CD20 binding domain comprises a sequence that is at least about 70% to about 99% or more identical to a sequence selected from the group consisting of SEQ ID NOS: 3793-3808 and 3880. In some embodiments, the CD20 binding domain comprises a sequence that is at least about 70%, 75%, 80%, 85%, 90%, 95%, 96%, 97%, 98%, 99%, or 100% identical to a sequence selected from the group consisting of SEQ ID NOS: 3793-3808 and 3880. In some embodiments, the CD20 binding domain comprises a sequence of SEQ ID NO: 3793-3808 and 3880.

### CD33 Binding Domain

[0130] Described herein are immune cell engaging proteins that comprise a CD33 binding domain as the target antigen binding domain, pharmaceutical compositions thereof, as well as nucleic acids, recombinant expression vectors and host cells for making such proteins thereof. Also provided are methods of using the disclosed proteins comprising a CD33 binding domain of this disclosure, in the prevention, and/or treatment of diseases, conditions and disorders.

[0131] CD33 (also known as Siglec-3, SIGLEC3, gp67, p67) is a 67 kDa plasma membrane protein that binds to sialic acid and is a member of the sialic acid-binding Ig-related lectin (SIGLEC) family of proteins. Siglec proteins are thought to be involved in diverse biological processes such as hematopoiesis, neuronal development and immunity (Vinson et al., J Biol. Chem. 271:9267-9272 (1996)). Studies also suggest that Siglec proteins mediate cell adhesion/cell signaling through recognition of sialylated cell surface glycans (Kelm et al., Glycoconj. J. 13:913-926 (1996); Kelm et al., Eur. J Biochem. 255:663-672 (1998); Vinson et al., J Biol. Chem. 271:9267-9272 (1996)). The extracellular portion of CD33 contains two immunoglobulin domains (one IgV domain and one IgC2 domain). The IgV domain is distal to the membrane whereas the IgC2 domain is proximal to the membrane. The intracellular portion of CD33 contains immunoreceptor tyrosine-based inhibitory motifs (ITIMs). In the immune response, CD33 may act as an inhibitory receptor upon ligand induced tyrosine phosphorylation by recruiting cytoplasmic phosphatase(s) that block signal transduction through dephosphorylation of signaling molecules.

[0132] CD33 is known to be expressed on myeloid cells. CD33 expression has also been reported on a number of malignant cells. Anti-CD33 agents are generally allocated in four groups: naked antibodies, antibody toxin conjugates, radionuclide conjugates, and bispecific antibodies. Although CD33 has been targeted for treatment of cancer, e.g., acute myeloid leukemia, no effective CD33-targeted treatments are currently on the market. Existing anti-CD33 agents suffer from, inter alia, inferior tumor antigen binding avidity and short in vivo half-life.

[0133] In some embodiments, the CD33 binding domain comprises a sequence that is at least about 70% to about 99% or more identical to a sequence selected from the group consisting of SEQ ID NOS: 3809-3823. In some embodiments, the CD33 binding domain comprises a sequence that is at least about 70%, 75%, 80%, 85%, 90%, 95%, 96%, 97%, 98%, 99%, or 100% identical to a sequence selected from the group consisting of SEQ ID NOS: 3809-3823. In some embodiments, the CD33 binding domain comprises a sequence selected from the group consisting of SEQ ID NOS: 3809-3823.

### Prostate Specific Membrane Antigen (PSMA) Binding Proteins

[0134] Described herein are immune cell engaging proteins that comprise a PSMA binding domain as the target antigen binding domain, pharmaceutical compositions thereof, as well as nucleic acids, recombinant expression vectors and host cells for making such proteins thereof. Also provided are methods of using the disclosed proteins comprising a PSMA binding domain of this disclosure, in the prevention, and/or treatment of diseases, conditions and disorders.

[0135] PSMA is a 100 kD Type II membrane glycoprotein expressed in prostate tissues having sequence identity with the transferrin receptor with NAALADase activity. PSMA is expressed in increased amounts in prostate cancer, and elevated levels of PSMA are also detectable in the sera of these patients. PSMA expression increases with disease progression, becoming highest in metastatic, hormone-refractory disease for which there is no present therapy.

[0136] In some embodiments, the PSMA binding domain comprises the following formula: f1-r1-f2-r2-f3-r3-f4, wherein r1, r2, and r3 are complementarity determining regions CDR1, CDR2, and CDR3, respectively, and f1, f2, f3, and f4 are framework residues, and wherein r1 comprises SEQ ID NO: 462, SEQ ID NO: 463, SEQ ID NO: 464, or SEQ ID NO: 465, r2 comprises SEQ ID NO: 466, SEQ ID NO: 467, SEQ ID NO: 468, SEQ ID NO: 469, SEQ ID NO: 470, SEQ ID NO: 471, SEQ ID NO: 472, or SEQ ID NO: 473, and r3 comprises SEQ ID NO: 474, or SEQ ID NO: 475.

[0137] In some embodiments, PSMA binding domains described herein comprise a polypeptide having a sequence described in SEQ ID NO: 462-489 and subsequences thereof. In some embodiments, the PSMA binding domain comprises a polypeptide having at least 70%-95% or more homology to a sequence described in SEQ ID NO: 462-489. In some embodiments, the PSMA binding domain comprises a polypeptide having at least 70%, 75%, 80%, 85%, 90%, 95%, 96%, 97%, 98%, 99%, or more identity to a sequence described in SEQ ID NO: 462-489. In some embodiments, the PSMA binding domain has a sequence comprising at least a portion of a sequence described in SEQ ID NO: 462-489. In some embodiments, the HSA binding domain comprises a polypeptide comprising one or more of the sequences described in SEQ ID NO: 462-489.

[0138] In some embodiments, PSMA binding domains described herein comprise a single domain antibody with a CDR1 comprising SEQ ID NO: 462-465. In some embodiments, PSMA binding domains described herein comprise a single domain antibody with a CDR2 comprising SEQ ID NO: 466-473. In some embodiments, PSMA binding domains described herein comprise a single domain antibody with a CDR3 comprising SEQ ID NO: 474 and 475.

### Mesothelin (MSLN) Binding Proteins

[0139] Described herein are immune cell engaging proteins that comprise an MSLN binding domain as the target antigen binding domain, pharmaceutical compositions thereof, as well as nucleic acids, recombinant expression vectors and host cells for making such proteins thereof. Also provided are methods of using the disclosed proteins comprising an MSLN binding domain of this disclosure, in the prevention, and/or treatment of diseases, conditions and disorders.

[0140] MSLN is a GPI-linked membrane bound tumor antigen. MSLN is overexpressed ovarian, pancreatic, lung and triple-negative breast cancers and mesothelioma. Normal tissue expression of MSLN is restricted to single-cell, mesothelial layers lining the pleural, pericardial, and peritoneal cavities. Overexpression of MSLN is associated with poor prognosis in lung adenocarcinoma and triple-negative breast cancer. MSLN has been used as cancer antigen for numerous modalities, including immunotoxins, vaccines, antibody drug conjugates and CAR-T cells. Early signs of clinical efficacy have validated MSLN as a target, but therapies with improved efficacy are needed to treat MSLN-expressing cancers.

[0141] Mesothelin is a glycoprotein present on the surface of cells of the mesothelial lining of the peritoneal, pleural and pericardial body cavities. The mesothelin gene (MSLN) encodes a 71 kD precursor protein that is processed to a 40 kD protein termed mesothelin, which is a glycosyl-phosphatidylinositol-anchored glycoprotein present on the cell surface (Chang, et al., Proc Natl Acad Sci USA (1996) 93:136-40). The mesothelin cDNA was cloned from a library prepared from the HPC-Y5 cell line (Kojima et al. (1995) J. Biol. Chem. 270:21984-21990). The cDNA also was cloned using the monoclonal antibody K1, which recognizes mesotheliomas (Chang and Pastan (1996) Proc. Natl. Acad. Sci. USA 93:136-40). Mesothelin is a differentiation antigen whose expression in normal human tissues is limited to mesothelial cells lining the body cavity, such as the pleura, pericardium and peritoneum. Mesothelin is also highly expressed in several different human cancers, including mesotheliomas, pancreatic adenocarcinomas, ovarian cancers, stomach and lung adenocarcinomas. (Hassan, et al., Eur J Cancer (2008) 44:46-53) (Ordonez, Am J Surg Pathol (2003) 27:1418-28; Ho, et al., Clin Cancer Res (2007) 13:1571-5). Mesothelin is overexpressed in a vast majority of primary pancreatic adenocarcinomas with rare and weak expression seen in benign pancreatic tissue. Argani P, et al. Clin Cancer Res. 2001; 7(12):3862-3868. Epithelial malignant pleural mesothelioma (MPM) universally expresses mesothelin while sarcomatoid MPM likely does not express mesothelin. Most serous epithelial ovarian carcinomas, and the related primary peritoneal carcinomas, express mesothelin.

[0142] Mesothelin can also be used a marker for diagnosis and prognosis of certain types of cancer because trace amounts of mesothelin can be detected in the blood of some patients with mesothelin-positive cancers (Cristaudo et al., Clin. Cancer Res. 13:5076-5081, 2007). It has been reported that mesothelin may be released into serum through deletion at its carboxyl terminus or by proteolytic cleavage from its membrane bound form (Hassan et al., Clin. Cancer Res. 10:3937-3942, 2004). An increase in the soluble form of mesothelin was detectable several years before malignant mesotheliomas occurred among workers exposed to asbestos (Creaney and Robinson, Hematol. Oncol. Clin. North Am. 19:1025-1040, 2005). Furthermore, patients with ovarian, pancreatic, and lung cancers also have elevated soluble mesothelin in serum (Cristaudo et al., Clin. Cancer Res. 13:5076-5081, 2007; Hassan et al., Clin. Cancer Res. 12:447-453, 2006; Croso et al., Cancer Detect. Prev. 30:180-187, 2006). Accordingly, mesothelin is an appropriate target for methods of disease prevention or treatment and there is a need for effective antibodies specific for mesothelin.

[0143] It has been shown that cell surface mature mesothelin comprises three distinct domains, namely Regions I (comprising residues 296-390), II (comprising residues 391-486), and III (comprising residue 487-598). (Tang et al., A human single-domain antibody elicits potent antitumor activity by targeting an epitope in mesothelin close to the cancer cell surface, Mol. Can. Therapeutics, 12(4): 416-426, 2013). The first antibodies generated against mesothelin for therapeutic intervention were designed to interfere with the interaction between mesothelin and CA-125. Phage display identified the Fv SS, which was affinity optimized and used to generate a recombinant immunotoxin targeting mesothelin, SS1P. The MORAb-009 antibody amatuximab, which also uses SS1, recognizes a non-linear epitope in the amino terminal 64 amino acids of mesothelin, within region I. The SS1 Fv was also used to generate chimeric antigen receptor-engineered T cells. Recently, new anti-mesothelin antibodies have been reported that recognize other regions of the mesothelin protein. The present disclosure provides, in certain embodiments, MSLN targeting immune cell engaging proteins containing binding domains which specifically bind to MSLN on the surface of tumor target cells.

[0144] In some embodiments, the MSLN binding domain binds to a protein comprising the sequence of SEQ ID NO: 3204. In some embodiments, the MSLN binding domain binds to a protein comprising a truncated sequence compared to SEQ ID NO: 3204.

[0145] In some embodiments, the MSLN binding domains disclosed herein recognize full-length mesothelin. In certain instances, the MSLN binding domains disclosed herein recognize an epitope in region I (comprising amino acid residues 296-390 of SEQ ID NO: 3204), region II (comprising amino acid residue 391-486 of SEQ ID NO: 3204), or region III (comprising amino acid residues 487-598 of SEQ ID NO: 3204) of mesothelin. It is contemplated that the MSLN binding domains of the present disclosure may, in some embodiments, recognize and bind to epitopes that are located outside regions I, II, or III of mesothelin. In yet other embodiments are disclosed MSLN binding domains that recognize and bind to an epitope different than the MORAb-009 antibody.

[0146] In some embodiments, the MSLN binding domain is a polypeptide comprising an amino acid sequence that is comprised of four framework regions/sequences (f1-f4) interrupted by three complementarity determining regions/sequences, as represented by the formula: f1-r1-f2-r2-f3-r3-f4, wherein r1, r2, and r3 are complementarity determining regions CDR1, CDR2, and CDR3, respectively, and f1, f2, f3, and f4 are framework residues. The framework residues of the MSLN binding protein of the present disclosure comprise, for example, 75, 76, 77, 78, 79, 80, 81, 82, 83, 84, 85, 86, 87, 88, 89, 90, 91, 92, 93, or 94 amino acid residues, and the complementarity determining regions comprise, for example, 24, 25, 26, 27, 28, 29, 30, 31, 32, 33, 34, 35, or 36 amino acid residues. In some embodiments, the MSLN binding domain comprises an amino acid sequence selected from SEQ ID NOS: 607-650, or a sequence comprising at least 75% to about 95% or more (e.g., 96%, 97%, 98%, 99%, or more) identity to a sequence selected from the group consisting of SEQ ID NOS: 605-670.

[0147] In some embodiments, the CDR1 comprises the amino acid sequence as set forth in SEQ ID NO: 490 or a variant having one, two, three, four, five, six, seven, eight, nine, or ten amino acid substitutions in SEQ ID NO: 490. In some embodiments, the CDR2 comprises a sequence as set forth in SEQ ID NO: 3505 or a variant having one, two, three, four, five, six, seven, eight, nine, or ten amino acid substitutions in SEQ ID NO: 3505. In some embodiments, the CDR3 comprises a sequence as set forth in SEQ ID NO: 3506 or a variant having one, two, three, four, five, six, seven, eight, nine, or ten amino acid substitutions in SEQ ID NO: 3506.

[0148] In some embodiments, the CDR1 comprises the amino acid sequence as set forth in SEQ ID NO: 518 or a variant having one, two, three, four, five, six, seven, eight, nine, or ten amino acid substitutions in SEQ ID NO: 518. In some embodiments, the CDR2 comprises a sequence as set forth in SEQ ID NO: 3507 or a variant having one, two, three, four, five, six, seven, eight, nine, or ten amino acid substitutions in SEQ ID NO: 3507. In some embodiments, the CDR3 comprises a sequence as set forth in SEQ ID NO: 3508 or a variant having one, two, three, four, five, six, seven, eight, nine, or ten amino acid substitutions in SEQ ID NO: 3508.

[0149] In some embodiments, the CDR1 comprises the amino acid sequence as set forth in any one of SEQ ID NOS: 490-528 or a variant having one, two, three, four, five, six, seven, eight, nine, or ten amino acid substitutions in any one of SEQ ID NOS: 490-528. In some embodiments, the CDR2 comprises a sequence as set forth in any one of SEQ ID NOS: 529-567 or a variant having one, two, three, four, five, six, seven, eight, nine, or ten amino acid substitutions in any one of SEQ ID NOS: 529-567. In some embodiments, the CDR3 comprises a sequence as set forth in any one of SEQ ID NOS: 568-606 or a variant having one, two, three, four, five, six, seven, eight, nine, or ten amino acid substitutions in any one of SEQ ID NOS: 568-606.

[0150] In various embodiments, the MSLN binding domain of the present disclosure is at least about 75%, about 76%, about 77%, about 78%, about 79%, about 80%, about 81%, about 82%, about 83%, about 84%, about 85%, about 86%, about 87%, about 88%, about 89%, about 90%, about 91%, about 92%, about 93%, about 94%, about 95%, about 96%, about 97%, about 98%, about 99%, or about 100% identical to an amino acid sequence selected from SEQ ID NOS: 607-650.

[0151] In various embodiments, a complementarity determining region of the MSLN binding domain of the present disclosure is at least about 10%, about 20%, about 30%, about 40%, about 50%, about 60%, about 70%, about 80%, about 81%, about 82%, about 83%, about 84%, about 85%, about 86%, about 87%, about 88%, about 89%, about 90%, about 91%, about 92%, about 93%, about 94%, about 95%, about 96%, about 97%, about 98%, about 99%, or about 100% identical to the amino acid sequence set forth in SEQ ID NO: 490, SEQ ID NO: 518, or any one of SEQ ID NOS: 490-528.

[0152] In various embodiments, a complementarity determining region of the MSLN binding domain of the present disclosure is at least about 10%, about 20%, about 30%, about 40%, about 50%, about 60%, about 70%, about 80%, about 81%, about 82%, about 83%, about 84%, about 85%, about 86%, about 87%, about 88%, about 89%, about 90%, about 91%, about 92%, about 93%, about 94%, about 95%, about 96%, about 97%, about 98%, about 99%, or about 100% identical to the amino acid sequence set forth in SEQ ID NO: 3505, SEQ ID NO: 3507, or any one of SEQ ID NOS: 529-567.

[0153] In various embodiments, a complementarity determining region of the MSLN binding domain of the present disclosure is at least about 10%, about 20%, about 30%, about 40%, about 50%, about 60%, about 70%, about 80%, about 81%, about 82%, about 83%, about 84%, about 85%, about 86%, about 87%, about 88%, about 89%, about 90%, about 91%, about 92%, about 93%, about 94%, about 95%, about 96%, about 97%, about 98%, about 99%, or about 100% identical to the amino acid sequence set forth in SEQ ID NO: 3506, SEQ ID NO: 3508, or any one of SEQ ID NOS: 568-606.

[0154] In some embodiments, any of the foregoing MSLN binding domains (e.g., anti-MSLN single domain antibodies of SEQ ID NOS: 607-650) are affinity peptide tagged for ease of purification. In some embodiments, the affinity peptide tag is six consecutive histidine residues, also referred to as 6X-his (SEQ ID NO: 3503).

[0155] In certain embodiments, the MSLN binding domains of the present disclosure preferentially bind membrane bound mesothelin over soluble mesothelin. Membrane bound mesothelin refers to the presence of mesothelin in or on the cell membrane surface of a cell that expresses mesothelin. Soluble mesothelin refers to mesothelin that is no longer on in or on the cell membrane surface of a cell that expresses or expressed mesothelin. In certain instances, the soluble mesothelin is present in the blood and/or lymphatic circulation in a subject. In one embodiment, the MSLN binding domains bind membrane-bound mesothelin at least 5 fold, 10 fold, 15 fold, 20 fold, 25 fold, 30 fold, 40 fold, 50 fold, 100 fold, 500 fold, or 1000 fold greater than soluble mesothelin. In one embodiment, the MSLN targeting immune cell engaging proteins of the present disclosure preferentially bind membrane-bound mesothelin 30 fold greater than soluble mesothelin. Determining the preferential binding of an antigen binding protein to membrane bound MSLN over soluble MSLN can be readily determined using assays well known in the art.

### B Cell Maturation Antigen (BCMA) Binding Proteins

[0156] Described herein are immune cell engaging proteins that comprise an BCMA binding domain as the target antigen binding domain, pharmaceutical compositions thereof, as well as nucleic acids, recombinant expression vectors and host cells for making such proteins thereof. Also provided are methods of using the disclosed proteins comprising an BCMA binding domain of this disclosure, in the prevention, and/or treatment of diseases, conditions and disorders.

[0157] B cell maturation antigen (BCMA, TNFRSF17, CD269) is a transmembrane protein belonging to the tumor necrosis family receptor (TNFR) super family that is primarily expressed on terminally differentiated B cells. BCMA expression is restricted to the B cell lineage and mainly present on plasma cells and plasmablasts and to some extent on memory B cells, but virtually absent on peripheral and naive B cells. BCMA is also expressed on multiple myeloma (MM) cells, on leukemia cells and lymphoma cells.

[0158] BCMA was identified through molecular analysis of a t(4;16)(q26;p13) translocation found in a human intestinal T cell lymphoma and an in-frame sequence was mapped to the 16p13.1 chromosome band.

[0159] Human BCMA cDNA has an open reading frame of 552 bp that encodes a 184 amino acid polypeptide. The BCMA gene is organized into three exons that are separated by two introns, each flanked by GT donor and AG acceptor consensus splicing sites, and codes for a transcript of 1.2 kb. The structure of BCMA protein includes an integral transmembrane protein based on a central 24 amino acid hydrophobic region in an alpha-helix structure.

[0160] The murine BCMA gene is located on chromosome 16 syntenic to the human 16p13 region, and also includes three exons that are separated by two introns. The gene encodes a 185 amino acid protein. Murine BCMA mRNA is expressed as a 404 bp transcript at the highest levels in plasmacytoma cells (J558) and at modest levels in the A20 B cell lymphoma line. Murine BCMA mRNA transcripts have also been detected at low levels in T cell lymphoma (EL4, BW5147) and dendritic cell (CB1D6, D2SC1) lines in contrast to human cell lines of T cell and dendritic cell origin. The murine BCMA cDNA sequence has 69.3% nucleotide identity with the human BCMA cDNA sequence and slightly higher identity (73.7%) when comparing the coding regions between these two cDNA sequences. Mouse BCMA protein is 62% identical to human BCMA protein and, like human BCMA, contains a single hydrophobic region, which may be an internal transmembrane segment. The N-terminal 40 amino acid domain of both murine and human BCMA protein have six conserved cysteine residues, consistent with the formation of a cysteine repeat motif found in the extracellular domain of TNFRs. Similar to members of the TNFR superfamily, BCMA protein contains a conserved aromatic residue four to six residues C-terminal from the first cysteine.

[0161] BCMA is not expressed at the cell surface, but rather, is located on the Golgi apparatus. The amount of BCMA expression is proportional to the stage of cellular differentiation (highest in plasma cells).

[0162] BCMA is involved in B cell development and homeostasis due to its interaction with its ligands BAFF (B cell activating factor, also designated as TALL-1 or TNFSF13B) and APRIL (A proliferation inducing ligand). BCMA regulates different aspects of humoral immunity, B cell development and homeostasis along with its family members TACI (transmembrane activator and cyclophilin ligand interactor) and BAFF-R (B cell activation factor receptor, also known as tumor necrosis factor receptor superfamily member 13C). Expression of BCMA appears rather late in B cell differentiation and contributes to the long-term survival of plasmablasts and plasma cells in the bone marrow. BCMA also supports growth and survival of multiple myeloma (MM) cells. BCMA is mostly known for its functional activity in mediating the survival of plasma cells that maintain long-term humoral immunity.

[0163] The present disclosure provides, in certain embodiments, single domain proteins which specifically bind to BCMA on the surface of tumor target cells.

[0164] In some embodiments, the BCMA binding domain binds to a protein comprising the sequence of SEQ ID NO: 3201, 3202 or 3203. In some embodiments, the BCMA binding domain binds to a protein comprising a truncated sequence compared to SEQ ID NO: 3201, 3202 or 3203.

[0165] In some embodiments, the BCMA binding protein of the present disclosure is a polypeptide comprising an amino acid sequence that is comprised of four framework regions/sequences (f1-f4) interrupted by three complementarity determining regions/sequences, as represented by the formula: f1-r1-f2-r2-f3-r3-f4, wherein r1, r2, and r3 are complementarity determining regions CDR1, CDR2, and CDR3, respectively, and f1, f2, f3, and f4 are framework residues. The r1 residues of the BCMA binding protein of the present disclosure comprise, for example, amino acid residues 26, 27, 28, 29, 30, 31, 32, 33 and 34; the r2 residues of the BCMA binding protein of the present disclosure comprise, for example, amino acid residues, for example, 50, 51, 52, 53, 54, 55, 56, 57, 58, 59, 60, 61, 62 and 63; and the r3 residues of the BCMA binding protein of the present disclosure comprise, for example, amino acid residues, for example, 97, 98, 99, 100, 101, 102, 103, 104, 105, 106, 107 and 108. In some embodiments, the BCMA binding protein comprises an amino acid sequence selected from SEQ ID NOS: 346-460, or a sequence comprising at least 75% to about 95% or more (e.g., 96%, 97%, 98%, 99%, or more) identity to a sequence selected from the group consisting of SEQ ID NOS: 346-460.

[0166] In some embodiments, an exemplary CDR1 comprises the amino acid sequence as set forth in SEQ ID NO: 1-115. In some embodiments, another exemplary CDR2 comprises the amino acid sequence as set forth in SEQ ID NO: 116-230. In some embodiments, another exemplary CDR3 comprises the amino acid sequence as set forth in SEQ ID NO: 231-345.

[0167] In various embodiments, the BCMA binding protein of the present disclosure has a CDR1 that has an amino acid sequence that is at least about 75%, about 76%, about 77%, about 78%, about 79%, about 80%, about 81%, about 82%, about 83%, about 84%, about 85%, about 86%, about 87%, about 88%, about 89%, about 90%, about 91%, about 92%, about 93%, about 94%, about 95%, about 96%, about 97%, about 98%, about 99%, or about 100% identical to an amino acid sequence selected from SEQ ID NOS: 1-115.

[0168] In various embodiments, the BCMA binding protein of the present disclosure has a CDR2 that has an amino acid sequence that is at least about 75%, about 76%, about 77%, about 78%, about 79%, about 80%, about 81%, about 82%, about 83%, about 84%, about 85%, about 86%, about 87%, about 88%, about 89%, about 90%, about 91%, about 92%, about 93%, about 94%, about 95%, about 96%, about 97%, about 98%, about 99%, or about 100% identical to an amino acid sequence selected from SEQ ID NOS: 116-230.

[0169] In various embodiments, a complementarity determining region of the BCMA binding protein of the present disclosure has a CDR3 that has an amino acid sequence that is at least about 10%, about 20%, about 30%, about 40%, about 50%, about 60%, about 70%, about 80%, about 81%, about 82%, about 83%, about 84%, about 85%, about 86%, about 87%, about 88%, about 89%, about 90%, about 91%, about 92%, about 93%, about 94%, about 95%, about 96%, about 97%, about 98%, about 99%, or about 100% identical to an amino acid sequence selected from SEQ ID NOS: 231-345.

[0170] In various embodiments, a BCMA binding protein of the present disclosure has an amino acid sequence that is at least about 10%, about 20%, about 30%, about 40%, about 50%, about 60%, about 70%, about 80%, about 81%, about 82%, about 83%, about 84%, about 85%, about 86%, about 87%, about 88%, about 89%, about 90%, about 91%, about 92%, about 93%, about 94%, about 95%, about 96%, about 97%, about 98%, about 99%, or about 100% identical to an amino acid sequence selected from SEQ ID NOS: 346-460.

[0171] In some embodiments, the BCMA binding protein is a single domain antibody comprising the sequence of SEQ ID NO: 346. In some embodiments, the BCMA binding protein is a single domain antibody comprising the sequence of SEQ ID NO: 347. In some embodiments, the BCMA binding protein is a single domain antibody comprising the sequence of SEQ ID NO: 348. In some embodiments, the BCMA binding protein is a single domain antibody comprising the sequence of SEQ ID NO: 349. In some embodiments, the BCMA binding protein is a single domain antibody comprising the sequence of SEQ ID NO: 350. In some embodiments, the BCMA binding protein is a single domain antibody comprising the sequence of SEQ ID NO: 351. In some embodiments, the BCMA binding protein is a single domain antibody comprising the sequence of SEQ ID NO: 352. In some embodiments, the BCMA binding protein is a single domain antibody comprising the sequence of SEQ ID NO: 353. In some embodiments, the BCMA binding protein is a single domain antibody comprising the sequence of SEQ ID NO: 354. In some embodiments, the BCMA binding protein is a single domain antibody comprising the sequence of SEQ ID NO: 355. In some embodiments, the BCMA binding protein is a single domain antibody comprising the sequence of SEQ ID NO: 356. In some embodiments, the BCMA binding protein is a single domain antibody comprising the sequence of SEQ ID NO: 357. In some embodiments, the BCMA binding protein is a single domain antibody comprising the sequence of SEQ ID NO: 358. In some embodiments, the BCMA binding protein is a single domain antibody comprising the sequence of SEQ ID NO: 359.

[0172] In some embodiments, the BCMA binding protein is a single domain antibody comprising the sequence of SEQ ID NO: 360. In some embodiments, the BCMA binding protein is a single domain antibody comprising the sequence of SEQ ID NO: 361. In some embodiments, the BCMA binding protein is a single domain antibody comprising the sequence of SEQ ID NO: 362. In some embodiments, the BCMA binding protein is a single domain antibody comprising the sequence of SEQ ID NO: 363. In some embodiments, the BCMA binding protein is a single domain antibody comprising the sequence of SEQ ID NO: 364. In some embodiments, the BCMA binding protein is a single domain antibody comprising the sequence of SEQ ID NO: 365. In some embodiments, the BCMA binding protein is a single domain antibody comprising the sequence of SEQ ID NO: 366. In some embodiments, the BCMA binding protein is a single domain antibody comprising the sequence of SEQ ID NO: 367. In some embodiments, the BCMA binding protein is a single domain antibody comprising the sequence of SEQ ID NO: 368. In some embodiments, the BCMA binding protein is a single domain antibody comprising the sequence of SEQ ID NO: 369.

[0173] In some embodiments, the BCMA binding protein is a single domain antibody comprising the sequence of SEQ ID NO: 370. In some embodiments, the BCMA binding protein is a single domain antibody comprising the sequence of SEQ ID NO: 371. In some embodiments, the BCMA binding protein is a single domain antibody comprising the sequence of SEQ ID NO: 372. In some embodiments, the BCMA binding protein is a single domain antibody comprising the sequence of SEQ ID NO: 373. In some embodiments, the BCMA binding protein is a single domain antibody comprising the sequence of SEQ ID NO: 374. In some embodiments, the BCMA binding protein is a single domain antibody comprising the sequence of SEQ ID NO: 375. In some embodiments, the BCMA binding protein is a single domain antibody comprising the sequence of SEQ ID NO: 376. In some embodiments, the BCMA binding protein is a single domain antibody comprising the sequence of SEQ ID NO: 377. In some embodiments, the BCMA binding protein is a single domain antibody comprising the sequence of SEQ ID NO: 378. In some embodiments, the BCMA binding protein is a single domain antibody comprising the sequence of SEQ ID NO: 379.

[0174] In some embodiments, the BCMA binding protein is a single domain antibody comprising the sequence of SEQ ID NO: 380. In some embodiments, the BCMA binding protein is a single domain antibody comprising the sequence of SEQ ID NO: 381. In some embodiments, the BCMA binding protein is a single domain antibody comprising the sequence of SEQ ID NO: 382. In some embodiments, the BCMA binding protein is a single domain antibody comprising the sequence of SEQ ID NO: 383. In some embodiments, the BCMA binding protein is a single domain antibody comprising the sequence of SEQ ID NO: 384. In some embodiments, the BCMA binding protein is a single domain antibody comprising the sequence of SEQ ID NO: 385. In some embodiments, the BCMA binding protein is a single domain antibody comprising the sequence of SEQ ID NO: 386. In some embodiments, the BCMA binding protein is a single domain antibody comprising the sequence of SEQ ID NO: 387. In some embodiments, the BCMA binding protein is a single domain antibody comprising the sequence of SEQ ID NO: 388. In some embodiments, the BCMA binding protein is a single domain antibody comprising the sequence of SEQ ID NO: 389.

[0175] In some embodiments, the BCMA binding protein is a single domain antibody comprising the sequence of SEQ ID NO: 390. In some embodiments, the BCMA binding protein is a single domain antibody comprising the sequence of SEQ ID NO: 391. In some embodiments, the BCMA binding protein is a single domain antibody comprising the sequence of SEQ ID NO: 392. In some embodiments, the BCMA binding protein is a single domain antibody comprising the sequence of SEQ ID NO: 393. In some embodiments, the BCMA binding protein is a single domain antibody comprising the sequence of SEQ ID NO: 394. In some embodiments, the BCMA binding protein is a single domain antibody comprising the sequence of SEQ ID NO: 395. In some embodiments, the BCMA binding protein is a single domain antibody comprising the sequence of SEQ ID NO: 396. In some embodiments, the BCMA binding protein is a single domain antibody comprising the sequence of SEQ ID NO: 397. In some embodiments, the BCMA binding protein is a single domain antibody comprising the sequence of SEQ ID NO: 398. In some embodiments, the BCMA binding protein is a single domain antibody comprising the sequence of SEQ ID NO: 399.

[0176] In some embodiments, the BCMA binding protein is a single domain antibody comprising the sequence of SEQ ID NO: 400. In some embodiments, the BCMA binding protein is a single domain antibody comprising the sequence of SEQ ID NO: 401. In some embodiments, the BCMA binding protein is a single domain antibody comprising the sequence of SEQ ID NO: 402. In some embodiments, the BCMA binding protein is a single domain antibody comprising the sequence of SEQ ID NO: 403. In some embodiments, the BCMA binding protein is a single domain antibody comprising the sequence of SEQ ID NO: 404. In some embodiments, the BCMA binding protein is a single domain antibody comprising the sequence of SEQ ID NO: 405. In some embodiments, the BCMA binding protein is a single domain antibody comprising the sequence of SEQ ID NO: 406. In some embodiments, the BCMA binding protein is a single domain antibody comprising the sequence of SEQ ID NO: 407. In some embodiments, the BCMA binding protein is a single domain antibody comprising the sequence of SEQ ID NO: 408. In some embodiments, the BCMA binding protein is a single domain antibody comprising the sequence of SEQ ID NO: 409.

[0177] In some embodiments, the BCMA binding protein is a single domain antibody comprising the sequence of SEQ ID NO: 410. In some embodiments, the BCMA binding protein is a single domain antibody comprising the sequence of SEQ ID NO: 411. In some embodiments, the BCMA binding protein is a single domain antibody comprising the sequence of SEQ ID NO: 412. In some embodiments, the BCMA binding protein is a single domain antibody comprising the sequence of SEQ ID NO: 413. In some embodiments, the BCMA binding protein is a single domain antibody comprising the sequence of SEQ ID NO: 414. In some embodiments, the BCMA binding protein is a single domain antibody comprising the sequence of SEQ ID NO: 415. In some embodiments, the BCMA binding protein is a single domain antibody comprising the sequence of SEQ ID NO: 416. In some embodiments, the BCMA binding protein is a single domain antibody comprising the sequence of SEQ ID NO: 417. In some embodiments, the BCMA binding protein is a single domain antibody comprising the sequence of SEQ ID NO: 418. In some embodiments, the BCMA binding protein is a single domain antibody comprising the sequence of SEQ ID NO: 419.

[0178] In some embodiments, the BCMA binding protein is a single domain antibody comprising the sequence of SEQ ID NO: 420. In some embodiments, the BCMA binding protein is a single domain antibody comprising the sequence of SEQ ID NO: 421. In some embodiments, the BCMA binding protein is a single domain antibody comprising the sequence of SEQ ID NO: 422. In some embodiments, the BCMA binding protein is a single domain antibody comprising the sequence of SEQ ID NO: 423. In some embodiments, the BCMA binding protein is a single domain antibody comprising the sequence of SEQ ID NO: 424. In some embodiments, the BCMA binding protein is a single domain antibody comprising the sequence of SEQ ID NO: 425. In some embodiments, the BCMA binding protein is a single domain antibody comprising the sequence of SEQ ID NO: 426. In some embodiments, the BCMA binding protein is a single domain antibody comprising the sequence of SEQ ID NO: 427. In some embodiments, the BCMA binding protein is a single domain antibody comprising the sequence of SEQ ID NO: 428. In some embodiments, the BCMA binding protein is a single domain antibody comprising the sequence of SEQ ID NO: 429.

[0179] In some embodiments, the BCMA binding protein is a single domain antibody comprising the sequence of SEQ ID NO: 430. In some embodiments, the BCMA binding protein is a single domain antibody comprising the sequence of SEQ ID NO: 431. In some embodiments, the BCMA binding protein is a single domain antibody comprising the sequence of SEQ ID NO: 432. In some embodiments, the BCMA binding protein is a single domain antibody comprising the sequence of SEQ ID NO: 433. In some embodiments, the BCMA binding protein is a single domain antibody comprising the sequence of SEQ ID NO: 434. In some embodiments, the BCMA binding protein is a single domain antibody comprising the sequence of SEQ ID NO: 435. In some embodiments, the BCMA binding protein is a single domain antibody comprising the sequence of SEQ ID NO: 436. In some embodiments, the BCMA binding protein is a single domain antibody comprising the sequence of SEQ ID NO: 437. In some embodiments, the BCMA binding protein is a single domain antibody comprising the sequence of SEQ ID NO: 438. In some embodiments, the BCMA binding protein is a single domain antibody comprising the sequence of SEQ ID NO: 439.

[0180] In some embodiments, the BCMA binding protein is a single domain antibody comprising the sequence of SEQ ID NO: 440. In some embodiments, the BCMA binding protein is a single domain antibody comprising the sequence of SEQ ID NO: 441. In some embodiments, the BCMA binding protein is a single domain antibody comprising the sequence of SEQ ID NO: 442. In some embodiments, the BCMA binding protein is a single domain antibody comprising the sequence of SEQ ID NO: 443. In some embodiments, the BCMA binding protein is a single domain antibody comprising the sequence of SEQ ID NO: 444. In some embodiments, the BCMA binding protein is a single domain antibody comprising the sequence of SEQ ID NO: 445. In some embodiments, the BCMA binding protein is a single domain antibody comprising the sequence of SEQ ID NO: 446. In some embodiments, the BCMA binding protein is a single domain antibody comprising the sequence of SEQ ID NO: 447. In some embodiments, the BCMA binding protein is a single domain antibody comprising the sequence of SEQ ID NO: 448. In some embodiments, the BCMA binding protein is a single domain antibody comprising the sequence of SEQ ID NO: 449.

[0181] In some embodiments, the BCMA binding protein is a single domain antibody comprising the sequence of SEQ ID NO: 450. In some embodiments, the BCMA binding protein is a single domain antibody comprising the sequence of SEQ ID NO: 451. In some embodiments, the BCMA binding protein is a single domain antibody comprising the sequence of SEQ ID NO: 452. In some embodiments, the BCMA binding protein is a single domain antibody comprising the sequence of SEQ ID NO: 453. In some embodiments, the BCMA binding protein is a single domain antibody comprising the sequence of SEQ ID NO: 454. In some embodiments, the BCMA binding protein is a single domain antibody comprising the sequence of SEQ ID NO: 455. In some embodiments, the BCMA binding protein is a single domain antibody comprising the sequence of SEQ ID NO: 456. In some embodiments, the BCMA binding protein is a single domain antibody comprising the sequence of SEQ ID NO: 457. In some embodiments, the BCMA binding protein is a single domain antibody comprising the sequence of SEQ ID NO: 458. In some embodiments, the BCMA binding protein is a single domain antibody comprising the sequence of SEQ ID NO: 459. In some embodiments, the BCMA binding protein is a single domain antibody comprising the sequence of SEQ ID NO: 460.

[0182] In some embodiments, any of the foregoing BCMA binding domains are affinity peptide tagged for ease of purification. In some embodiments, the affinity peptide tag is six consecutive histidine residues, also referred to as a His tag or 6X-his (His-His-His-His-His-His; SEQ ID NO: 3503).

[0183] In certain embodiments, the BCMA binding domains of the present disclosure preferentially bind membrane bound BCMA over soluble BCMA. Membrane bound BCMA refers to the presence of BCMA in or on the cell membrane surface of a cell that expresses BCMA. Soluble BCMA refers to BCMA that is no longer on in or on the cell membrane surface of a cell that expresses or expressed BCMA. In certain instances, the soluble BCMA is present in the blood and/or lymphatic circulation in a subject. In one embodiment, the BCMA binding domains bind membrane-bound BCMA at least 5 fold, 10 fold, 15 fold, 20 fold, 25 fold, 30 fold, 40 fold, 50 fold, 100 fold, 500 fold, or 1000 fold greater than soluble BCMA. In one embodiment, the BCMA targeting immune cell engaging proteins of the present disclosure preferentially bind membrane-bound BCMA 30 fold greater than soluble BCMA. Determining the preferential binding of an antigen binding protein to membrane bound BCMA over soluble BCMA can be readily determined using assays well known in the art.

### Delta-Like Ligand 3 (DLL3) Binding Proteins

[0184] DLL3 (also known as Delta-like Ligand 3 or SCDO1) is a member of the Delta-like family of Notch DSL ligands. Representative DLL3 protein orthologs include, but are not limited to, human (Accession NOS: NP_058637 and NP_982353), chimpanzee (Accession NO: XP_003316395), mouse (Accession NO: NP_031892), and rat (Accession NO: NP_446118). In humans, the DLL3 gene consists of 8 exons spanning 9.5 kbp located on chromosome 19q13. Alternate splicing within the last exon gives rise to two processed transcripts, one of 2389 bases (Accession NO: NM_016941) and one of 2052 bases (Accession NO: NM_203486). The former transcript encodes a 618 amino acid protein (Accession NO: NP_058637), whereas the latter encodes a 587 amino acid protein (Accession NO: NP_982353). These two protein isoforms of DLL3 share overall 100% identity across their extracellular domains and their transmembrane domains, differing only in that the longer isoform contains an extended cytoplasmic tail containing 32 additional residues at the carboxy terminus of the protein. The extracellular region of the DLL3 protein, comprises six EGF-like domains, the single DSL domain and the N-terminal domain. Generally, the EGF domains are recognized as occurring at about amino acid residues 216-249 (domain 1), 274-310 (domain 2), 312-351 (domain 3), 353-389 (domain 4), 391-427 (domain 5) and 429-465 (domain 6), with the DSL domain at about amino acid residues 176-215 and the N-terminal domain at about amino acid residues 27-175 of hDLL3. Each of the EGF-like domains, the DSL domain and the N-terminal domain comprise part of the DLL3 protein as defined by a distinct amino acid sequence. The EGF-like domains are termed, in some embodiments, as EGF1 to EGF6 with EGF1 being closest to the N-terminal portion of the protein. In general, DSL ligands are composed of a series of structural domains: a unique N-terminal domain, followed by a conserved DSL domain, multiple tandem epidermal growth factor (EGF)-like repeats, a transmembrane domain, and a cytoplasmic domain not highly conserved across ligands but one which contains multiple lysine residues that are potential sites for ubiquitination by unique E3 ubiquitin ligases. The DSL domain is a degenerate EGF-domain that is necessary but not sufficient for interactions with Notch receptors. Additionally, the first two EGF-like repeats of most DSL ligands contain a smaller protein sequence motif known as a DOS domain that co-operatively interacts with the DSL domain when activating Notch signaling.

[0185] In some embodiments, the disclosed DLL3 immune cell engaging proteins of this disclosure are generated, fabricated, engineered or selected so as to react with a selected domain, motif or epitope within a DLL3 protein. In some embodiments, the DLL3 targeting immune cell engaging protein binds to the DSL domain and, in some embodiments, binds to an epitope comprising G203, R205, P206 within the DSL domain.

[0186] The DLL3 binding domain of the DLL3 targeting immune cell engaging proteins of the present disclosure are, in some embodiments, engineered fabricated and/or selected to react with both isoform(s) of DLL3 or a single isoform of the protein or, conversely, comprise a pan-DLL binding domain that reacts or associates with at least one additional DLL family member in addition to DLL3. In some embodiments, the DLL3 binding domain, such as DLL3 binding domain are engineered, fabricated, and/or selected so that they react with domains (or epitopes therein) that are exhibited by DLL3 only or with domains that are at least somewhat conserved across multiple or all DLL family members.

[0187] In some embodiments the DLL3 binding domain associates or binds to a specific epitope, portion, motif or domain of DLL3. Both DLL3 isoforms incorporate an identical extracellular region comprising at least an N-terminal domain, a DSL (Delta/Serrate/lag-2) domain and six EGF-like domains (i.e., EGF1-EGF6). Accordingly, in certain embodiments the DLL3 binding domain binds or associate with the N-terminal domain of DLL3 (amino acids 27-175 in the mature protein) while in other embodiments the DLL3 binding domain associates with the DSL domain (amino acids 176-215) or epitope therein. In other aspects of the present disclosure the DLL3 binding domain associates or bind to a specific epitope located in a particular EGF-like domain of DLL3. In some embodiments, the DLL3 binding domain associates or binds to an epitope located in EGF1 (amino acids 216-249), EGF2 (amino acids 274-310), EGF3 (amino acids 312-351), EGF4 (amino acids 353-389), EGF5 (amino acids 391.427) or EGF6 (amino acids 429-465). In some embodiments, each of the aforementioned domains comprises more than one epitope and/or more than one bin. In some embodiments the DLL3 binding domain binds, reacts or associates with the DSL domain or an epitope therein. In other embodiments the DLL3 binding domain binds, reacts or associates with a particular EGF-like domain or an epitope therein. In some embodiments the DLL3 binding domain binds, reacts or associates with the N-terminal domain or an epitope therein.

[0188] In some embodiments, the DLL3 binding proteins of this disclosure, such as the DLL3 binding domain of the immune cell engaging proteins of this disclosure binds to the full length DLL3 protein or to a fragment thereof, such as epitope containing fragments within the full length DLL3 protein, as described above. In some cases, the epitope containing fragment comprises antigenic or immunogenic fragments and derivatives thereof of the DLL3 protein. Epitope containing fragments, including antigenic or immunogenic fragments, are, in some embodiments, 12 amino acids or more, 20 amino acids or more, 50 or 100 amino acids or more. The DLL3 fragments, in some embodiments, comprises 95% or more of the length of the full protein, 90% or more, 75% or 50% or 25% or 10% or more of the length of the full protein. In some embodiments, the epitope-containing fragments of DLL3 including antigenic or immunogenic fragments are capable of eliciting a relevant immune response in a patient. Derivatives of DLL3 include, in some embodiments, variants on the sequence in which one or more (e.g., 1-20 such as 15 amino acids, or up to 20% such as up to 10% or 5% or 1% by number of amino acids based on the total length of the protein) deletions, insertions or substitutions have been made to the DLL3 sequence provided in SEQ ID NO: 3216 (UniProtKB Accession Q9NYJ7). In some embodiments, substitutions comprise conservative substitutions. Derivatives and variants of DLL3, in some examples, have essentially the same biological function as the DLL3 protein from which they are derived. For instance, derivatives and variants of DLL3 are, in some cases, comparably antigenic or immunogenic to the protein from which they are derived, have either the ligand-binding activity, or the active receptor-complex forming ability, or preferably both, of the protein from which they are derived, and have the same tissue distribution as DLL3.

[0189] In some embodiments, the DLL3 binding domain binds to a protein comprising the sequence of SEQ ID NO: 3216 (UniProtKB Accession Q9NYJ7). In some embodiments, the DLL3 binding domain binds to a protein comprising a truncated sequence compared to SEQ ID NO: 3216 (UniProtKB Accession Q9NYJ7). In some embodiments, the DLL3 binding domain binds to a protein comprising the sequence of SEQ ID NO: 3509 or SEQ ID NO: 3217 (which is the mature extracellular domain of a DLL3 protein). In some embodiments, the DLL3 binding domain binds to a protein comprising amino acids 47-492 of SEQ ID NO: 3509. In some embodiments, the DLL3 binding domain recognizes an epitope within amino acids 47-4492 of SEQ ID NO: 3509.

[0190] In another example of a substitution to create a variant anti-DLL3 antibody, one or more hypervariable region residues of a parent antibody are substituted. In general, variants are then selected based on improvements in desired properties compared to a parent antibody, for example, increased affinity, reduced affinity, reduced immunogenicity, increased pH dependence of binding.

[0191] In some embodiments, the DLL3 binding domain is a polypeptide comprising an amino acid sequence that is comprised of four framework regions/sequences (f1-f4) interrupted by three complementarity determining regions/sequences, as represented by the formula: f1-r1-f2-r2-f3-r3-f4, wherein r1, r2, and r3 are complementarity determining regions CDR1, CDR2, and CDR3, respectively, and f1, f2, f3, and f4 are framework residues. The framework residues of the DLL3 binding protein of the present disclosure comprise, for example, 75, 76, 77, 78, 79, 80, 81, 82, 83, 84, 85, 86, 87, 88, 89, 90, 91, 92, 93, or 94 amino acid residues, and the complementarity determining regions comprise, for example, 24, 25, 26, 27, 28, 29, 30, 31, 32, 33, 34, 35, or 36 amino acid residues. In some embodiments, the DLL3 binding domain comprises an amino acid sequence selected from SEQ ID NOS: 1308-1750. In some embodiments, CDR1 of the DLL3 binding domain comprises a sequence selected from SEQ ID NOS: 1751-2193, or one or more amino acid substitutions relative to a sequence selected from the group consisting of SEQ ID NOS: 1751-2193. In some embodiments, CDR2 comprises a sequence selected from the group consisting of SEQ ID NOS: 2194-2636, or one or more amino acid substitutions relative to a sequence selected from the group consisting of SEQ ID NOS: 2194-2636. In some embodiments, the CDR3 comprises a sequence selected from the group consisting of SEQ ID NOS: 2637-3080, or one or more substitutions relative to a sequence selected from SEQ ID NOS: 2637-3080.

[0192] In some embodiments, the CDR1 comprises an amino acid sequence selected from SEQ ID NOS: 1751-2193 or a variant having one, two, three, four, five, six, seven, eight, nine, or ten amino acid substitutions in an amino acid selected from SEQ ID NOS: 1751-2193. In some embodiments, the CDR2 comprises an amino acid sequence selected from SEQ ID NOS: 2194-2636 or a variant having one, two, three, four, five, six, seven, eight, nine, or ten amino acid substitutions in an amino acid sequence selected from SEQ ID NOS: 2194-2636. In some embodiments, the CDR3 comprises an amino acid sequence selected from SEQ ID NOS: 2637-3080 or a variant having one, two, three, four, five, six, seven, eight, nine, or ten amino acid substitutions in a sequence selected from SEQ ID NOS: 2637-3080.

[0193] In some embodiments, the CDR1 comprises an amino acid sequence selected from SEQ ID NOS: 1803-1836 or a variant having one, two, three, four, five, six, seven, eight, nine, or ten amino acid substitutions in an amino acid selected from SEQ ID NOS: 1803-1836. In some embodiments, the CDR2 comprises an amino acid sequence selected from SEQ ID NOS: 2246-2279 or a variant having one, two, three, four, five, six, seven, eight, nine, or ten amino acid substitutions in an amino acid sequence selected from SEQ ID NOS: 2246-2279. In some embodiments, the CDR3 comprises an amino acid sequence selected from SEQ ID NOS: 2689-2722 or a variant having one, two, three, four, five, six, seven, eight, nine, or ten amino acid substitutions in a sequence selected from SEQ ID NOS: 2689-2722.

[0194] In some embodiments, the CDR1 comprises an amino acid sequence selected from SEQ ID NOS: 1837-2117 or a variant having one, two, three, four, five, six, seven, eight, nine, or ten amino acid substitutions in an amino acid selected from SEQ ID NOS: 1837-2117. In some embodiments, the CDR2 comprises an amino acid sequence selected from SEQ ID NOS: 2280-2560 or a variant having one, two, three, four, five, six, seven, eight, nine, or ten amino acid substitutions in an amino acid sequence selected from SEQ ID NOS: 2280-2560. In some embodiments, the CDR3 comprises an amino acid sequence selected from SEQ ID NOS: 2723-3003 or a variant having one, two, three, four, five, six, seven, eight, nine, or ten amino acid substitutions in a sequence selected from SEQ ID NOS: 2723-3003.

[0195] In some embodiments, the CDR1 comprises an amino acid sequence selected from SEQ ID NOS: 2118-2193 or a variant having one, two, three, four, five, six, seven, eight, nine, or ten amino acid substitutions in an amino acid selected from SEQ ID NOS: 2118-2193. In some embodiments, the CDR2 comprises an amino acid sequence selected from SEQ ID NOS: 2561-2636 or a variant having one, two, three, four, five, six, seven, eight, nine, or ten amino acid substitutions in an amino acid sequence selected from SEQ ID NOS: 2561-2636. In some embodiments, the CDR3 comprises an amino acid sequence selected from SEQ ID NOS: 3004-3080 or a variant having one, two, three, four, five, six, seven, eight, nine, or ten amino acid substitutions in a sequence selected from SEQ ID NOS: 3004-3080.

[0196] In various embodiments, the DLL3 binding domain of the present disclosure is at least about 75%, about 76%, about 77%, about 78%, about 79%, about 80%, about 81%, about 82%, about 83%, about 84%, about 85%, about 86%, about 87%, about 88%, about 89%, about 90%, about 91%, about 92%, about 93%, about 94%, about 95%, about 96%, about 97%, about 98%, about 99%, or about 100% identical to an amino acid sequence selected from SEQ ID NOS: 1308-1750. In various embodiments, the DLL3 binding domain of the present disclosure is at least about 75%, about 76%, about 77%, about 78%, about 79%, about 80%, about 81%, about 82%, about 83%, about 84%, about 85%, about 86%, about 87%, about 88%, about 89%, about 90%, about 91%, about 92%, about 93%, about 94%, about 95%, about 96%, about 97%, about 98%, about 99%, or about 100% identical to an amino acid sequence selected from SEQ ID NOS: 1360-1393.

[0197] In various embodiments, the DLL3 binding domain of the present disclosure is at least about 75%, about 76%, about 77%, about 78%, about 79%, about 80%, about 81%, about 82%, about 83%, about 84%, about 85%, about 86%, about 87%, about 88%, about 89%, about 90%, about 91%, about 92%, about 93%, about 94%, about 95%, about 96%, about 97%, about 98%, about 99%, or about 100% identical to an amino acid sequence selected from SEQ ID NOS: 1394-1674.

[0198] In various embodiments, the DLL3 binding domain of the present disclosure is at least about 75%, about 76%, about 77%, about 78%, about 79%, about 80%, about 81%, about 82%, about 83%, about 84%, about 85%, about 86%, about 87%, about 88%, about 89%, about 90%, about 91%, about 92%, about 93%, about 94%, about 95%, about 96%, about 97%, about 98%, about 99%, or about 100% identical to SEQ ID No. 1375, or a sequence derived from SEQ ID NO: 1375.

[0199] In various embodiments, the DLL3 binding domain of the present disclosure is at least about 75%, about 76%, about 77%, about 78%, about 79%, about 80%, about 81%, about 82%, about 83%, about 84%, about 85%, about 86%, about 87%, about 88%, about 89%, about 90%, about 91%, about 92%, about 93%, about 94%, about 95%, about 96%, about 97%, about 98%, about 99%, or about 100% identical to SEQ ID No. 1382, or a sequence derived from SEQ ID No. 1382.

[0200] In certain embodiments, the DLL3 binding domains of the present disclosure preferentially bind membrane bound DLL3 over soluble DLL3. Membrane bound DLL3 refers to the presence of DLL3 in or on the cell membrane surface of a cell that expresses DLL3. Soluble DLL3 refers to DLL3 that is no longer on in or on the cell membrane surface of a cell that expresses or expressed DLL3. In certain instances, the soluble DLL3 is present in the blood and/or lymphatic circulation in a subject. In one embodiment, the DLL3 binding proteins bind membrane-bound DLL3 at least 5 fold, 10 fold, 15 fold, 20 fold, 25 fold, 30 fold, 40 fold, 50 fold, 100 fold, 500 fold, or 1000 fold greater than soluble DLL3. In one embodiment, the antigen binding proteins of the present disclosure preferentially bind membrane-bound DLL3 30 fold greater than soluble DLL3. Determining the preferential binding of an antigen binding protein to membrane bound DLL3 over soluble DLL3 can be readily determined using assays well known in the art.

[0201] In some embodiments, any of the foregoing DLL3 binding domains (e.g., anti-DLL3 single domain antibodies of SEQ ID NOS: 1308-1750) are affinity peptide tagged for ease of purification. In some embodiments, the affinity peptide tag is six consecutive histidine residues, also referred to as 6X-his (SEQ ID NO: 3503).

[0202] In some embodiments, any of the foregoing DLL3 binding domains (e.g., anti-DLL3 single domain antibodies of SEQ ID NOS: 1308-1750) are affinity peptide tagged for ease of purification. In some embodiments, the affinity peptide tag is six consecutive histidine residues, also referred to as 6X-His (SEQ ID NO: 3503).

### Epidermal Growth Factor Receptor (EGFR) Binding Proteins

[0203] Described herein are immune cell engaging proteins that comprise an EGFR binding domain as the target antigen binding domain, pharmaceutical compositions thereof, as well as nucleic acids, recombinant expression vectors and host cells for making such proteins thereof. Also provided are methods of using the disclosed proteins comprising an EGFR binding domain of this disclosure, in the prevention, and/or treatment of diseases, conditions and disorders.

[0204] Epidermal growth factor receptor (EGFR) has been causally implicated in human malignancy. Abnormal activity of the Her family of receptors is involved with breast cancer. EGFR, Her-3, and Her-4 are frequently expressed in ovarian granulosa cell tumors (Leibl, S. et al., Gynecol Oncol 101:18-23 (2005). In particular, increased expression of EGFR has been observed in breast, bladder, lung, head, neck and stomach cancer as well as glioblastomas.

[0205] Increased EGFR receptor expression may be associated with increased production of a EGFR ligand, transforming growth factor alpha (TGF-α), by the same tumor cells resulting in receptor activation by an autocrine stimulatory pathway.

[0206] Cetuximab (ERBITUX™), an anti-EGFR antibody, has been associated with potentially life-threatening infusion reactions (Thomas, M., Clin J Oncol Nurs. 9(3):332-8 (2005)). Gefitinib (IRESSA™) and erlotinib (TARCEVA™), both EGFR specific small molecule inhibitors, are associated with a risk of interstitial lung disease (Sandler A, Oncology 20 (5 Suppl 2):35-40 (2006)). Individual patients may be predisposed to particular types of complications that affect the choice of drug treatment. There is a need for a greater choice of treatment options which allows physicians to select the therapeutic with the best side effect profile for an individual patient. The present disclosure provides novel polypeptides and protein therapeutics useful in methods of treatment, particularly for treatment of conditions associated with abnormal expression of EGFR.

[0207] Epidermal growth factor receptor (EGFR, also known as HER1 or ErbB1) is a member of the ErbB/HER family of type 1 receptor tyrosine kinases (RTKs). Other members of this family include ErbB2 (HER2 or Neu), ErbB3 (HER3) and ErbB4 (HER4). Known ligands for EGFR include epidermal growth factor (EGF) and transforming growth factor alpha (TGF-alpha). Ligand binding to EGFR is known to induce tyrosine phosphorylation and receptor dimerization with other ErbB family members.

[0208] RTKs such as EGFR function to allow cells to respond to diverse external stimuli. However, aberrant activation and/or overexpression of EGFR is associated with the development and progression of several human cancers. Accordingly, EGFR is a target for anti-cancer therapies. Approved drugs targeting EGFR include small molecule inhibitors such as gefitinib (IRESSA®) and erlotinib (TARCEVA®), and anti-EGFR antibodies such as cetuximab (ERBITUX®) and panitumumab (VECTIBIX®). Anti-EGFR antibodies are mentioned in, e.g., U.S. Pat. Nos. 4,943,533, 5,844,093, 7,060,808, 7,247,301, 7,595,378, 7,723,484, and 7,939,072.

[0209] There is still a need for having available further options for the treatment of diseases related to the overexpression of EGFR, including, but not limited to, renal cell carcinoma, pancreatic carcinoma, breast cancer, head and neck cancer, prostate cancer, malignant gliomas, osteosarcoma, colorectal cancer, gastric cancer (e.g., gastric cancer with MET amplification), malignant mesothelioma, multiple myeloma, ovarian cancer, small cell lung cancer, non-small cell lung cancer (e.g., EGFR-dependent non-small cell lung cancer), synovial sarcoma, thyroid cancer, or melanoma. The present disclosure provides, in certain embodiments, EGFR binding proteins, EGFR targeting immune cell engaging proteins containing EGFR binding domains which specifically bind to EGFR on the surface of tumor target cells.

[0210] In some embodiments, the EGFR binding domain of this disclosure binds to a protein comprising the sequence of SEQ ID NO: 3205 (UniProt Accession NO: Q504U8). In some embodiments, the EGFR binding domain binds to a protein comprising a truncated sequence compared to SEQ ID NO: 3205. In some embodiments, the EGFR binding domain binds to a protein comprising the sequence of SEQ ID NO: 3206 (UniProt Accession NO: Q01279). In some embodiments, the EGFR binding domain binds to a protein comprising a truncated sequence compared to SEQ ID NO: 3206. In some embodiments, the EGFR binding domain binds to a protein comprising the sequence of SEQ ID NO: 3207 (UniProt Accession NO: A0A2K5WK39). In some embodiments, the EGFR binding domain binds to a protein comprising a truncated sequence compared to SEQ ID NO: 3207.

[0211] In some embodiments, the EGFR binding domains disclosed herein recognize full-length EGFR. In certain instances, the EGFR binding domains disclosed herein recognize an epitope within EGFR, such as, in some cases the EGFR targeting immune cell engaging proteins interact with one or more amino acids found within the extracellular domain of human EGFR (e.g., within extracellular domain I, II, III, and/or IV). The epitope to which the antibodies bind may consist of a single contiguous sequence of 3 or more (e.g., 3, 4, 5, 6, 7, 8, 9, 10, 11, 12, 13, 14, 15, 16, 17, 18, 19, 20 or more) amino acids located within the extracellular domain of EGFR. Alternatively, the epitope may consist of a plurality of non-contiguous amino acids (or amino acid sequences) located within the extracellular domain of EGFR.

[0212] In some embodiments, the EGFR binding proteins of this disclosure binds to the full-length EGFR protein or to a fragment thereof, such as epitope containing fragments within the full-length EGFR protein, as described above. In some cases, the epitope containing fragment comprises antigenic or immunogenic fragments and derivatives thereof of the EGFR protein. Epitope containing fragments, including antigenic or immunogenic fragments, are, in some embodiments, 12 amino acids or more, e.g., 20 amino acids or more, 50 or 100 amino acids or more. The EGFR fragments, in some embodiments, comprises 95% or more of the length of the full protein, 90% or more, 75% or 50% or 25% or 10% or more of the length of the full protein. In some embodiments, the epitope-containing fragments of EGFR including antigenic or immunogenic fragments are capable of eliciting a relevant immune response in a patient. Derivatives of EGFR include, in some embodiments, variants on the sequence in which one or more (e.g., 1-20 such as 15 amino acids, or up to 20% such as up to 10% or 5% or 1% by number of amino acids based on the total length of the protein) deletions, insertions or substitutions have been made to the EGFR sequence provided in SEQ ID NO: 3205, 3206, or 3207.

[0213] In some embodiments, the EGFR binding domain is a polypeptide comprising an amino acid sequence that is comprised of four framework regions/sequences (f1-f4) interrupted by three complementarity determining regions/sequences, as represented by the formula: f1-r1-f2-r2-f3-r3-f4, wherein r1, r2, and r3 are complementarity determining regions CDR1, CDR2, and CDR3, respectively, and f1, f2, f3, and f4 are framework residues. The framework residues of the EGFR binding protein of the present disclosure comprise, for example, 75, 76, 77, 78, 79, 80, 81, 82, 83, 84, 85, 86, 87, 88, 89, 90, 91, 92, 93, or 94 amino acid residues, and the complementarity determining regions comprise, for example, 24, 25, 26, 27, 28, 29, 30, 31, 32, 33, 34, 35, or 36 amino acid residues. In some embodiments, the EGFR binding domain comprises an amino acid sequence selected from SEQ ID NOS: 798-846.

[0214] In some embodiments, the EGFR binding domains described herein comprise a polypeptide having a sequence selected from SEQ ID NOS: 798-846, subsequences thereof, and variants thereof. In some embodiments, the EGFR binding protein comprises at least 70%-95% or more identity to a sequence selected from SEQ ID NOS: 798-846, subsequences thereof, and variants thereof. In some embodiments, the EGFR binding protein comprises at least 70%, 75%, 80%, 85%, 90%, 95%, 96%, 97%, 98%, 99%, or more identity to a sequence selected from SEQ ID NOS: 798-846, subsequences thereof, and variants thereof.

[0215] In some embodiments, the CDR1 comprises the amino acid sequence as set forth in any one of SEQ ID NOS: 651-699 or a variant having one, two, three, four, five, six, seven, eight, nine, or ten amino acid substitutions in any one of SEQ ID NOS: 651-699. In some embodiments, the CDR2 comprises a sequence as set forth in any one of SEQ ID NOS: 700-748 or a variant having one, two, three, four, five, six, seven, eight, nine, or ten amino acid substitutions in any one of SEQ ID NOS: 700-748. In some embodiments, the CDR3 comprises a sequence as set forth in any one of SEQ ID NOS: 148-196 or a variant having one, two, three, four, five, six, seven, eight, nine, or ten amino acid substitutions in any one of SEQ ID NOS: 749-797.

[0216] In various embodiments, the EGFR binding domain of the present disclosure is at least about 75%, about 76%, about 77%, about 78%, about 79%, about 80%, about 81%, about 82%, about 83%, about 84%, about 85%, about 86%, about 87%, about 88%, about 89%, about 90%, about 91%, about 92%, about 93%, about 94%, about 95%, about 96%, about 97%, about 98%, about 99%, or about 100% identical to an amino acid sequence selected from SEQ ID NOS: 798-846.

[0217] In various embodiments, a complementarity determining region of the EGFR binding domain of the present disclosure is at least about 10%, about 20%, about 30%, about 40%, about 50%, about 60%, about 70%, about 80%, about 81%, about 82%, about 83%, about 84%, about 85%, about 86%, about 87%, about 88%, about 89%, about 90%, about 91%, about 92%, about 93%, about 94%, about 95%, about 96%, about 97%, about 98%, about 99%, or about 100% identical to an amino acid sequence set forth in any one of SEQ ID NOS: 651-699.

[0218] In various embodiments, a complementarity determining region of the EGFR binding domain of the present disclosure is at least about 10%, about 20%, about 30%, about 40%, about 50%, about 60%, about 70%, about 80%, about 81%, about 82%, about 83%, about 84%, about 85%, about 86%, about 87%, about 88%, about 89%, about 90%, about 91%, about 92%, about 93%, about 94%, about 95%, about 96%, about 97%, about 98%, about 99%, or about 100% identical to an amino acid sequence set forth in any one of SEQ ID NOS: 700-748.

[0219] In various embodiments, a complementarity determining region of the EGFR binding domain of the present disclosure is at least about 10%, about 20%, about 30%, about 40%, about 50%, about 60%, about 70%, about 80%, about 81%, about 82%, about 83%, about 84%, about 85%, about 86%, about 87%, about 88%, about 89%, about 90%, about 91%, about 92%, about 93%, about 94%, about 95%, about 96%, about 97%, about 98%, about 99%, or about 100% identical to an amino acid sequence set forth in any one of SEQ ID NOS: 749-797.

[0220] In some embodiments, any of the foregoing EGFR binding domains (e.g., anti-EGFR single domain antibodies of SEQ ID NOS: 798-846) are affinity peptide tagged for ease of purification. In some embodiments, the affinity peptide tag is six consecutive histidine residues, also referred to as 6X-His (SEQ ID NO: 3503).

[0221] In certain embodiments, the EGFR binding domains of the present disclosure preferentially bind membrane bound EGFR over soluble EGFR Membrane bound EGFR refers to the presence of EGFR in or on the cell membrane surface of a cell that expresses EGFR. Soluble EGFR refers to EGFR that is no longer on in or on the cell membrane surface of a cell that expresses or expressed EGFR. In certain instances, the soluble EGFR is present in the blood and/or lymphatic circulation in a subject. In one embodiment, the EGFR binding domains bind membrane-bound EGFR at least 5 fold, 10 fold, 15 fold, 20 fold, 25 fold, 30 fold, 40 fold, 50 fold, 100 fold, 500 fold, or 1000 fold greater than soluble EGFR. In one embodiment, the EGFR targeting immune cell engaging proteins of the present disclosure preferentially bind membrane-bound EGFR 30 fold greater than soluble EGFR. Determining the preferential binding of an antigen binding protein to membrane bound EGFR over soluble EGFR can be readily determined using binding assays. It is contemplated that in some embodiments the EGFR binding protein is fairly small and no more than 25 kDa, no more than 20 kDa, no more than 15 kDa, or no more than 10 kDa in some embodiments. In certain instances, the EGFR binding protein is 5 kDa or less if it is a peptide or small molecule entity.

[0222] In other embodiments, the EGFR binding proteins described herein comprise small molecule entity (SME) binders for EGFR. SME binders are small molecules averaging about 500 to 2000 Da in size and are attached to the EGFR binding proteins by known methods, such as sortase ligation or conjugation. In these instances, the EGFR binding protein comprises a domain comprising a sortase recognition sequence, e.g., LPETG (SEQ ID NO: 3200). To attach a SME binder to EGFR binding protein comprising a sortase recognition sequence, the protein is incubated with a sortase and a SME binder whereby the sortase attaches the SME binder to the recognition sequence. In yet other embodiments, the EGFR binding proteins described herein comprise a knottin peptide for binding EGFR. Knottins are disulfide-stabilized peptides with a cysteine knot scaffold and have average sizes about 3.5 kDa. Knottins have been contemplated for binding to certain tumor molecules such as EGFR. In further embodiments, the EGFR binding proteins described herein comprise a natural EGFR ligand.

[0223] In some embodiments, the EGFR binding protein comprises more than one domain and are of a single-polypeptide design with flexible linkage of the domains. This allows for facile production and manufacturing of the EGFR binding proteins as they can be encoded by single cDNA molecule to be easily incorporated into a vector. Further, in some embodiments where the EGFR binding proteins described herein are a monomeric single polypeptide chain, there are no chain pairing issues or a requirement for dimerization. It is contemplated that, in such embodiments, the EGFR binding proteins described herein have a reduced tendency to aggregate.

[0224] In some cases, where the EGFR binding protein comprises more than one domain, the domains within the EGFR binding proteins are conjugated using an enzymatic site-specific conjugation method which involves the use of a mammalian or bacterial transglutaminase enzyme. Microbial transglutaminases (mTGs) are versatile tools in modern research and biotechnology. The availability of large quantities of relatively pure enzymes, ease of use, and lack of regulation by calcium and guanosine-5′-triphosphate (GTP) has propelled mTG to be the main cross-linking enzyme used in both the food industry and biotechnology. Currently, mTGs are used in many applications to attach proteins and peptides to small molecules, polymers, surfaces, DNA, as well as to other proteins. See, e.g., Pavel Strp, Veracity of microbial transglutaminase, Bioconjugate Chem. 25, 5, 855-862).

[0225] In some examples are provided EGFR binding proteins comprising more than one domain, wherein one of the domains comprises an acceptor glutamine in a constant region, which can then be conjugated to another domain via a lysine-based linker (e.g., any primary amine chain which is a substrate for TGase, e.g. comprising an alkylamine, oxoamine) wherein the conjugation occurs exclusively on one or more acceptor glutamine residues present in the targeting moiety outside of the antigen combining site (e.g., outside a variable region, in a constant region). Conjugation thus does not occur on a glutamine, e.g., an at least partly surface exposed glutamine, within the variable region. The EGFR binding protein, in some examples, is formed by reacting one of the domains with a lysine-based linker in the presence of a TGase.

[0226] In some embodiments, where one or more domains within the EGFR binding proteins are directly joined, a hybrid vector is made where the DNA encoding the directly joined domains are themselves directly ligated to each other. In some embodiments, where linkers are used, a hybrid vector is made where the DNA encoding one domain is ligated to the DNA encoding one end of a linker moiety and the DNA encoding another domain is ligated to the other end of the linker moiety.

[0227] In some embodiments, the EGFR binding proteins as set forth above are fused to an Fc region from any species, including but not limited to, human immunoglobulin, such as human IgG1, a human IgG2, a human IgG3, human IgG4, to generate Fc-fusion proteins. In some embodiments, the Fc-fusion proteins of this disclosure have extended half-life compared to an otherwise identical EGFR binding protein. In some embodiments, the Fc-fusion EGFR binding proteins of this disclosure contain inter alia one or more additional amino acid residue substitutions, mutations and/or modifications, e.g., in the Fc region, which result in a binding protein with preferred characteristics including, but not limited to: altered pharmacokinetics, extended serum half-life.

[0228] In some embodiments, such Fc-fused EGFR binding proteins provide extended half-lives in a mammal, such as in a human, of greater than 5 days, greater than 10 days, greater than 15 days, greater than 20 days, greater than 25 days, greater than 30 days, greater than 35 days, greater than 40 days, greater than 45 days, greater than 2 months, greater than 3 months, greater than 4 months, or greater than 5 months. The increased half-life, in some cases, results in a higher serum titer which thus reduces the frequency of the administration of the EGFR binding proteins and/or reduces the concentration of the antibodies to be administered. Binding to human FcRn in vivo and serum half-life of human FcRn high affinity binding polypeptides is assayed, in some examples, in transgenic mice or transfected human cell lines expressing human FcRn, or in primates to which the polypeptides with a variant Fc region are administered.

[0229] The EGFR binding proteins, in some cases, are differentially modified during or after production, e.g., by glycosylation, acetylation, phosphorylation, amidation, derivatization by known protecting/blocking groups, proteolytic cleavage, linkage to an antibody molecule or other cellular ligand, etc. Any of numerous chemical modifications are carried out by techniques, including but not limited, to specific chemical cleavage by cyanogen bromide, trypsin, chymotrypsin, papain, V8 protease, NaBH4, acetylation, formylation, oxidation, reduction, metabolic synthesis in the presence of tunicamycin, etc.

[0230] Various post-translational modifications of the EGFR binding proteins also encompassed by the disclosure include, for example, N-linked or O-linked carbohydrate chains, processing of N-terminal or C-terminal ends, attachment of chemical moieties to the amino acid backbone, chemical modifications of N-linked or O-linked carbohydrate chains, and addition or deletion of an N-terminal methionine residue as a result of prokaryotic host cell expression. Moreover, the EGFR binding proteins are, in some cases, modified with a detectable label, such as an enzymatic, fluorescent, radioisotopic or affinity label to allow for detection and isolation of the modulator.

[0231] In some embodiments, the EGFR binding proteins of the disclosure are monovalent or multivalent bivalent, trivalent, etc.). As used herein, the term “valency” refers to the number of potential target binding sites associated with an antibody. Each target binding site specifically binds one target molecule or specific position or locus on a target molecule. When an antibody is monovalent, each binding site of the molecule will specifically bind to a single antigen position or epitope. When an antibody comprises more than one target binding site (multivalent), each target binding site may specifically bind the same or different molecules (e.g., may bind to different ligands or different antigens, or different epitopes or positions on the same antigen).

### FLT3 Binding Proteins

[0232] Described herein are immune cell engaging proteins that comprise an FLT3 binding domain as the target antigen binding domain, pharmaceutical compositions thereof, as well as nucleic acids, recombinant expression vectors and host cells for making such proteins thereof. Also provided are methods of using the disclosed proteins comprising an FLT3 binding domain of this disclosure, in the prevention, and/or treatment of diseases, conditions and disorders.

[0233] FLT3, also known as fetal liver kinase 2 (FLK-2), stem cell tyrosine kinase 1 (STK-1) and CD135, is a member of the class III receptor tyrosine kinases. Normally, FLT3 is expressed on immature myeloid-lymphocytic precursor cells and dendritic cell precursors, but rarely on mature adult cells. FLT3 is overexpressed in approximately 90% of acute myeloid leukemia (AML), a majority of acute lymphocytic leukemia (ALL) and the blast-crisis phase of chronic myeloid leukemia (BC-CML). Stimulation by FLT3 ligand (FL) enhances the proliferation and survival of leukemia cells. Inhibition of FLT3 signaling leads to apoptosis in dendritic cells and inhibition of immune responses. The MAPK, P13K and Stat5 pathways have been identified to be involved in the downstream signaling of activated FLT3 (See e.g., Stirewalt D L and J P, Radich, J P. Nat Rev Cancer 3:650-665 (2003)).

[0234] Described herein are immune cell engaging proteins that comprise an FLT3 binding domain, pharmaceutical compositions thereof, as well as nucleic acids, recombinant expression vectors and host cells for making such proteins thereof. Also provided are methods of using the disclosed proteins comprising an FLT3 binding domain of this disclosure, in the prevention, and/or treatment of diseases, conditions and disorders. In some embodiments, an FLT3 binding domain of this disclosure inhibits FL-induced phosphorylation of wild-type FLT3 and downstream kinases of MPK, P13K, and STAT5 pathways in a disease such as leukemia. In some embodiments, an FLT3 binding domain of this disclosure has an improved ability to activate downstream immune effector functions such as antibody dependent cellular cytotoxicity (ADCC).

[0235] In some embodiments, the FLT3 binding domain binds to a human FLT3 protein comprising a sequence as set forth in SEQ ID NO: 3215 (UniProt ID: P36888). In some embodiments, the FLT3 binding domain binds to a protein comprising a truncated sequence compared to SEQ ID NO: 3215 (UniProt ID: P36888).

[0236] In some embodiments, the FLT3 binding domains disclosed herein recognize full-length FLT3 (e.g., an FLT3 protein comprising the sequence of SEQ ID NO: 3215 (UniProt ID: P36888). In certain instances, the FLT3 binding domains disclosed herein recognize an epitope within FLT3, such as, in some cases the FLT3 binding proteins interact with one or more amino acids found within a domain of human FLT3. The epitope to which the antibodies bind may consist of a single contiguous sequence of 3 or more (e.g., 3, 4, 5, 6, 7, 8, 9, 10, 11, 12, 13, 14, 15, 16, 17, 18, 19, 20 or more) amino acids located within a domain of FLT3 (e.g., an FLT3 protein comprising the sequence of SEQ ID NO: 3215 (UniProt ID: P36888). Alternatively, the epitope may consist of a plurality of non-contiguous amino acids (or amino acid sequences) located within a domain of FLT3 (e.g., an FLT3 protein comprising the sequence of SEQ ID NO: 3215 (UniProt ID: P36888).

[0237] In some embodiments, the FLT3 binding proteins of this disclosure binds to the full length of an FLT3 protein or to a fragment thereof, such as epitope containing fragments within the full length FLT3 protein, as described above. In some cases, the epitope containing fragment comprises antigenic or immunogenic fragments and derivatives thereof of the FLT3 protein. Epitope containing fragments, including antigenic or immunogenic fragments, are, in some embodiments, 12 amino acids or more, e.g., 20 amino acids or more, 50 or 100 amino acids or more. The FLT3 fragments, in some embodiments, comprises 95% or more of the length of the full protein, 90% or more, 75% or 50% or 25% or 10% or more of the length of the full protein. In some embodiments, the epitope-containing fragments of FLT3 including antigenic or immunogenic fragments are capable of eliciting a relevant immune response in a patient. Derivatives of FLT3 include, in some embodiments, variants on the sequence in which one or more (e.g., 1-20 such as 15 amino acids, or up to 20% such as up to 10% or 5% or 1% by number of amino acids based on the total length of the protein) deletions, insertions or substitutions have been made to the FLT3 sequence (e.g., an FLT3 protein comprising the sequence of SEQ ID NO: 3215 (UniProt ID: P36888).

[0238] In some embodiments, the affinity matured FLT3 binding molecule comprises an equivalent or better affinity to a FLT3 protein (such as human FLT3 protein) as that of a FLT3 binding parental molecule, but that has reduced cross reactivity, or in some embodiments, increased cross reactivity, with selected substances, such as ligands, proteins, antigens, or the like, other than the FLT3 epitope for which the FLT3 binding parental molecule is specific, or is designed to be specific for. In regard to the latter, an affinity matured FLT3 binding molecule, in some embodiments, is more successfully tested in animal models if the affinity matured FLT3 binding molecule is reacted with both human FLT3 and the corresponding target of the animal model, e.g. mouse FLT3 or cynomolgus FLT3.

[0239] In another example of a substitution to create a variant anti-FLT3 antibody or antigen binding fragments thereof, one or more hypervariable region residues of a parent antibody or antigen binding fragments thereof are substituted. In general, variants are then selected based on improvements in desired properties compared to a parent antibody, for example, increased affinity, reduced affinity, reduced immunogenicity, increased pH dependence of binding.

[0240] In some embodiments, the FLT3 binding domain is a polypeptide comprising an amino acid sequence that is comprised of four framework regions/sequences (f1-f4) interrupted by three complementarity determining regions/sequences, as represented by the formula: f1-r1-f2-r2-f3-r3-f4, wherein r1, r2, and r3 are complementarity determining regions CDR1, CDR2, and CDR3, respectively, and f1, f2, f3, and f4 are framework residues. The framework residues of the FLT3 binding protein of the present disclosure comprise, for example, 75, 76, 77, 78, 79, 80, 81, 82, 83, 84, 85, 86, 87, 88, 89, 90, 91, 92, 93, or 94 amino acid residues, and the complementarity determining regions comprise, for example, 24, 25, 26, 27, 28, 29, 30, 31, 32, 33, 34, 35, or 36 amino acid residues.

[0241] In some embodiments, the binding proteins described herein comprise a polypeptide having a sequence selected from SEQ ID NOS: 1004-1079 and 3495-3496, subsequences thereof, and variants thereof. In some embodiments, the FLT3 binding protein comprises at least 75%-95% or more homology to a sequence selected from SEQ ID NOS: 1004-1079 and 3495-3496, subsequences thereof, and variants thereof. In some embodiments, the FLT3 binding protein comprises at least 75%, 80%, 85%, 90%, 95%, 96%, 97%, 98%, 99%, or more identity to a sequence selected from SEQ ID NOS: 1004-1079 and 3495-3496, subsequences thereof, and variants thereof. In some embodiments, the FLT3 binding protein comprises at least 60%-95% or more identity to a sequence selected from SEQ ID NOS: 1004-1079 and 3495-3496, subsequences thereof, and variants thereof. In some embodiments, the FLT3 binding protein comprises at least 75%, 80%, 85%, 90%, 95%, 96%, 97%, 98%, 99%, or more identity to a sequence selected from SEQ ID NOS: 1004-1079, subsequences thereof, and variants thereof.

[0242] In some embodiments, the CDR1 comprises the amino acid sequence selected from the group consisting of SEQ ID NOS: 1080-1155, and 3497-3498, or a sequence comprising one or more amino acid substitutions in a sequence selected from the group consisting of SEQ ID NOS: 1080-1155, and 3497-3498. In some embodiments, the CDR2 comprises the amino acid sequence selected from the group consisting of SEQ ID NOS: 1156-1231, and 3499-3500 or a sequence comprising one or more amino acid substitutions in a sequence selected from the group consisting of SEQ ID NOS: 1156-1231, and 3499-3500. In some embodiments, the CDR3 comprises the amino acid sequence selected from the group consisting of SEQ ID NOS: 1232-1307, and 3501-3502 or a sequence comprising one or more amino acid substitutions in a sequence selected from the group consisting of SEQ ID NOS: 1232-1307, and 3501-3502. In some embodiments, the CDR1 comprises the amino acid sequence selected from the group consisting of SEQ ID NOS: 1150, 1152, 3497, and 3498, or a sequence comprising one or more amino acid substitutions in a sequence selected from the group consisting of SEQ ID NOS: 1150, 1152, 3497, and 3498. In some embodiments, the CDR2 comprises the amino acid sequence selected from the group consisting of SEQ ID NOS: 1226, 1228, 3499, and 3500, or a sequence comprising one or more amino acid substitutions in a sequence selected from the group consisting of SEQ ID NOS: 1226, 1228, 3499, and 3500. In some embodiments, the CDR3 comprises the amino acid sequence selected from the group consisting of SEQ ID NOS: 1302, 1304, 3501, and 3502 or a sequence comprising one or more amino acid substitutions in a sequence selected from the group consisting of SEQ ID NOS: 1293 or 1302.

[0243] In various embodiments, the FLT3 binding domain of the present disclosure is at least about 75%, about 76%, about 77%, about 78%, about 79%, about 80%, about 81%, about 82%, about 83%, about 84%, about 85%, about 86%, about 87%, about 88%, about 89%, about 90%, about 91%, about 92%, about 93%, about 94%, about 95%, about 96%, about 97%, about 98%, about 99%, or about 100% identical to an amino acid sequence selected from SEQ ID NOS: 1004-1079, and 3495-3496.

[0244] In various embodiments, a complementarity determining region of the FLT3 binding domain of the present disclosure is at least about 10%, about 20%, about 30%, about 40%, about 50%, about 60%, about 70%, about 80%, about 81%, about 82%, about 83%, about 84%, about 85%, about 86%, about 87%, about 88%, about 89%, about 90%, about 91%, about 92%, about 93%, about 94%, about 95%, about 96%, about 97%, about 98%, about 99%, or about 100% identical to the amino acid sequence set forth in any one of SEQ ID NOS: 1080-1155, and 3497-3498.

[0245] In various embodiments, a complementarity determining region of the FLT3 binding domain of the present disclosure is at least about 10%, about 20%, about 30%, about 40%, about 50%, about 60%, about 70%, about 80%, about 81%, about 82%, about 83%, about 84%, about 85%, about 86%, about 87%, about 88%, about 89%, about 90%, about 91%, about 92%, about 93%, about 94%, about 95%, about 96%, about 97%, about 98%, about 99%, or about 100% identical to the amino acid sequence set forth in SEQ ID NOS: 1156-1231 and 3499-3500.

[0246] In various embodiments, a complementarity determining region of the FLT3 binding domain of the present disclosure is at least about 10%, about 20%, about 30%, about 40%, about 50%, about 60%, about 70%, about 80%, about 81%, about 82%, about 83%, about 84%, about 85%, about 86%, about 87%, about 88%, about 89%, about 90%, about 91%, about 92%, about 93%, about 94%, about 95%, about 96%, about 97%, about 98%, about 99%, or about 100% identical to the amino acid sequence set forth in SEQ ID NOS: 1232-1307 and 3501-3502.

[0247] In various embodiments, a complementarity determining region of the FLT3 binding domain of the present disclosure is at least about 10%, about 20%, about 30%, about 40%, about 50%, about 60%, about 70%, about 80%, about 81%, about 82%, about 83%, about 84%, about 85%, about 86%, about 87%, about 88%, about 89%, about 90%, about 91%, about 92%, about 93%, about 94%, about 95%, about 96%, about 97%, about 98%, about 99%, or about 100% identical to the amino acid sequence set forth in any one of SEQ ID NOS: 1074, 1076, 3495, and 3496 and wherein the FLT3 binding domain comprises a humanized FLT3 binding domain.

[0248] In some embodiments, any of the foregoing FLT3 binding domains (e.g., anti-FLT3 single domain antibodies of SEQ ID NOS: 1004-1079) are affinity peptide tagged for ease of purification. In some embodiments, the affinity peptide tag is six consecutive histidine residues, also referred to as 6X-his (SEQ ID NO: 3503). In certain embodiments, the FLT3 binding domains of the present disclosure preferentially bind membrane bound FLT3 over soluble FLT3 Membrane bound FLT3 refers to the presence of FLT3 in or on the cell membrane surface of a cell that expresses FLT3. Soluble FLT3 refers to FLT3 that is no longer on in or on the cell membrane surface of a cell that expresses or expressed FLT3. In certain instances, the soluble FLT3 is present in the blood and/or lymphatic circulation in a subject. In one embodiment, the FLT3 binding domains bind membrane-bound FLT3 at least 5 fold, 10 fold, 15 fold, 20 fold, 25 fold, 30 fold, 40 fold, 50 fold, 100 fold, 500 fold, or 1000 fold greater than soluble FLT3. In one embodiment, the FLT3 binding proteins of the present disclosure preferentially bind membrane-bound FLT3 30 fold greater than soluble FLT3. Determining the preferential binding of an antigen binding protein to membrane bound FLT3 over soluble FLT3 can be readily determined using binding assays.

[0249] It is contemplated that in some embodiments the FLT3 binding protein is fairly small and no more than 25 kDa, no more than 20 kDa, no more than 15 kDa, or no more than 10 kDa in some embodiments. In certain instances, the FLT3 binding protein is 5 kDa or less if it is a peptide or small molecule entity.

[0250] In other embodiments, the FLT3 binding proteins described herein comprise small molecule entity (SME) binders for FLT3. SME binders are small molecules averaging about 500 to 2000 Da in size and are attached to the FLT3 binding proteins by known methods, such as sortase ligation or conjugation. In these instances, the FLT3 binding protein comprises a domain comprising a sortase recognition sequence, e.g. LPETG (SEQ ID NO: 3200). To attach a SME binder to FLT3 binding protein comprising a sortase recognition sequence, the protein is incubated with a sortase and a SME binder whereby the sortase attaches the SME binder to the recognition sequence. In yet other embodiments, the FLT3 binding proteins described herein comprise a knottin peptide for binding FLT3. Knottins are disulfide-stabilized peptides with a cysteine knot scaffold and have average sizes about 3.5 kDa. Knottins have been contemplated for binding to certain tumor molecules such as FLT3. In further embodiments, the FLT3 binding proteins described herein comprise a natural FLT3 ligand.

[0251] In some embodiments, the FLT3 binding protein comprises more than one domain and are of a single-polypeptide design with flexible linkage of the domains. This allows for facile production and manufacturing of the FLT3 binding proteins as they can be encoded by single cDNA molecule to be easily incorporated into a vector. Further, in some embodiments where the FLT3 binding proteins described herein are a monomeric single polypeptide chain, there are no chain pairing issues or a requirement for dimerization. It is contemplated that, in such embodiments, the FLT3 binding proteins described herein have a reduced tendency to aggregate.

[0252] In some cases, where the FLT3 binding protein comprises more than one domain, the domains within the FLT3 binding proteins are conjugated using an enzymatic site-specific conjugation method which involves the use of a mammalian or bacterial transglutaminase enzyme. Microbial transglutaminases (mTGs) are versatile tools in modern research and biotechnology. The availability of large quantities of relatively pure enzymes, ease of use, and lack of regulation by calcium and guanosine-5′-triphosphate (GTP) has propelled mTG to be the main cross-linking enzyme used in both the food industry and biotechnology. Currently, mTGs are used in many applications to attach proteins and peptides to small molecules, polymers, surfaces, DNA, as well as to other proteins. See e.g., Pavel Strp, Veracity of microbial transglutaminase, Bioconjugate Chem. 25, 5, 855-862.

[0253] In some examples are provided FLT3 binding proteins comprising more than one domain, wherein one of the domains comprises an acceptor glutamine in a constant region, which can then be conjugated to another domain via a lysine-based linker (e.g. any primary amine chain which is a substrate for TGase, e.g. comprising an alkylamine, oxoamine) wherein the conjugation occurs exclusively on one or more acceptor glutamine residues present in the targeting moiety outside of the antigen combining site (e.g., outside a variable region, in a constant region). Conjugation thus does not occur on a glutamine, e.g. an at least partly surface exposed glutamine, within the variable region. The FLT3 binding protein, in some examples, is formed by reacting one of the domains with a lysine-based linker in the presence of a TGase.

[0254] In some embodiments, where one or more domains within the FLT3 binding proteins are directly joined, a hybrid vector is made where the DNA encoding the directly joined domains are themselves directly ligated to each other. In some embodiments, where linkers are used, a hybrid vector is made where the DNA encoding one domain is ligated to the DNA encoding one end of a linker moiety and the DNA encoding another domain is ligated to the other end of the linker moiety.

[0255] In certain embodiments, the FLT3 binding proteins according to the present disclosure may be incorporated into immune cell engaging proteins. In some embodiments, the immune cell engaging proteins comprise a CD3 binding domain, a half-life extension domain, and an FLT3 binding domain according to this disclosure. In some embodiments, the FLT3 binding trispecific protein comprises a trispecific antibody.

### EpCAM Binding Proteins

[0256] Described herein are immune cell engaging proteins that bind EpCAM, pharmaceutical compositions thereof, as well as nucleic acids, recombinant expression vectors and host cells for making such proteins thereof. Also provided are methods of using the disclosed EpCAM binding proteins in the prevention, and/or treatment of diseases, conditions and disorders. In some embodiments, the EpCAM binding proteins are part of immune cell engaging proteins that comprise an EpCAM binding domain as described herein.

[0257] The epithelial cell adhesion molecule (EpCAM) is a membrane glycoprotein that is expressed in most normal human epithelia and overexpressed in most carcinomas. This molecule is responsible for cell-to-cell adhesion and additionally participates in signaling, cell migration, proliferation and differentiation. Therefore, EpCAM has been the target of immunotherapy in clinical trials of several solid tumors. It has been found to play an important role in the detection and isolation of circulating tumor cells (CTCs). EpCAM has been shown in various studies to be beneficial in diagnosis and therapy of various carcinomas. Furthermore, in many cases, tumor cells were observed to express EpCAM to a much higher degree than their parental epithelium or less aggressive forms of said cancers. For example, EpCAM expression was shown to be significantly higher on neoplastic tissue and in adenocarcinoma than on normal prostate epithelium (n=76; p<0.0001), suggesting that increased EpCAM expression represents an early event in the development of prostate cancer. Seem Poczatek, J Urol., 1999, 162, 1462-1644. In addition, in the majority of both squamous and adenocarcinomas of the cervix a strong EpCAM expression has been shown to correlate with an increased proliferation and the disappearance of markers for terminal differentiation. See Litvinov, Am. J Pathol. 1996, 148, 865-75. One example is breast cancer where overexpression of EpCAM on tumor cells is a predictor of survival. See Gastl, Lancet. 2000, 356, 1981-1982. Furthermore, EpCAM has been described as a marker for the detection of disseminated tumor cells in patients suffering from squamous cell carcinoma of the head, neck and lung. See Chaubal, Anticancer Res 1999, 19, 2237-2242, Piyathilake, Hum Pathol. 2000, 31, 482-487. Normal squamous epithelium, as found in epidermis, oral cavity, epiglottis, pharynx, larynx and esophagus did not significantly express EpCAM. See Quak, Hybridoma, 1990, 9, 377-387.

[0258] EpCAM is contemplated to serve to adhere epithelial cells in an oriented and highly ordered fashion. See Litvinov, J Cell Biol. 1997, 139, 1337-1348. Upon malignant transformation of epithelial cells the rapidly growing tumor cells are believed to abandon the high cellular order of epithelia. Consequently, the surface distribution of EpCAM is contemplated to become less restricted and the molecule better exposed on tumor cells. Due to their epithelial cell origin, tumor cells from most carcinomas are expected to express EpCAM on their surface.

[0259] EpCAM, is a 40-kDa membrane-integrated glycoprotein of 314 amino acids with specific expression in certain epithelia and on many human carcinomas. See, e.g., in Balzar, J. Mol. Med. 1999, 77, 699-712). EpCAM was discovered and subsequently cloned through its recognition by the murine monoclonal antibody 17-1A/edrecolomab. See Goettlinger, Int J Cancer. 1986; 38, 47-53 and Simon, Proc. Natl. Acad. Sci. USA. 1990; 87, 2755-2759. Monoclonal antibody 17-1A was generated by immunization of mice with human colon carcinoma cells. See Koprowski, Somatic Cell Genet. 1979, 5, 957-971. The EGF-like repeats of EpCAM were shown to mediate lateral and reciprocal interactions in homophilic cell adhesion. See, e.g., Balzar, Mol. Cell. Biol. 2001, 21, 2570-2580) and, for that reason, is predominantly located between epithelial cells (Litvinov, J Cell Biol. 1997, 139, 1337-1348, Balzar, J Mol Med. 1999, 77, 699-712 and Trebak, J Biol Chem. 2001, 276, 2299-2309).

[0260] EpCAM is also known by the following alternate names: Epithelial Cell Adhesion Molecule, Tumor-Associated Calcium Signal Transducer, Major Gastrointestinal Tumor-Associated Protein GA733-2, Adenocarcinoma-Associated Antigen, Cell Surface Glycoprotein Trop-1, Epithelial Glycoprotein 314, TACSTD1, EGP314, MIC18, TROP1, M4S1, KSA, Membrane Component Chromosome 4 Surface marker (35 kD glycoprotein), Antigen identified by monoclonal antibody AUA-1, human epithelial glycoprotein-2, epithelial cell surface antigen, epithelial glycoprotein, KS 1/4Antigen, CD326 Antigen, GA722-2, HEGP314, HNPCC8, Ep-CAM, DIAR5, EGP-2, EGP40, KS ¼, MK-1, M1S2, ESA, and EGP. Exemplary protein sequences for EpCAM is provided in UniProtkB ID NOS: P16422 and B5MCA4. In some embodiments, the EpCAM binding proteins of this disclosure binds to an EpCAM sequence provided in UniProtkB ID NOS: P16422 (SEQ ID NO: 478) or B5MCA4 (SEQ ID NO: 475).

[0261] In some embodiments, the EpCAM binding domain binds to an extracellular domain of the mature EpCAM protein. The human extracellular domain sequence is provided in SEQ ID NO: 3212; the cynomolgus extracellular domain sequence is provided in SEQ ID NO: 3213; and the mouse extracellular domain sequence is provided in SEQ ID NO: 3214.

[0262] In some embodiments, the EpCAM binding domain binds to a protein comprising a truncated sequence compared to SEQ ID NO: 3208. In some embodiments, the EPCAM binding domain binds to a protein comprising the sequence of SEQ ID NO: 3208. In some embodiments, the EpCAM binding domain binds to a protein comprising a truncated sequence compared to SEQ ID NO: 3209. In some embodiments, the EpCAM binding domain binds to a protein comprising the sequence of SEQ ID NO: 3209. In some embodiments, the EpCAM binding domain binds to a protein comprising a truncated sequence compared to SEQ ID NO: 3210. In some embodiments, the EpCAM binding domain binds to a protein comprising a truncated sequence compared to SEQ ID NO: 3210. In some embodiments, the EpCAM binding domain binds to a protein comprising a truncated sequence compared to SEQ ID NO: 478. In some embodiments, the EpCAM binding domain binds to a protein comprising a truncated sequence compared to SEQ ID NO: 3211. In some embodiments, the EpCAM binding domain binds to a protein comprising a truncated sequence compared to SEQ ID NO: 3212. In some embodiments, the EpCAM binding domain binds to a protein comprising a truncated sequence compared to SEQ ID NO: 3212. In some embodiments, the EpCAM binding domain binds to a protein comprising a truncated sequence compared to SEQ ID NO: 3213. In some embodiments, the EpCAM binding domain binds to a protein comprising a truncated sequence compared to SEQ ID NO: 3213. In some embodiments, the EpCAM binding domain binds to a protein comprising a truncated sequence compared to SEQ ID NO: 3214. In some embodiments, the EpCAM binding domain binds to a protein comprising a truncated sequence compared to SEQ ID NO: 3214.

[0263] In some embodiments, the EpCAM binding domains disclosed herein recognize full-length EpCAM. In certain instances, the EpCAM binding domains disclosed herein recognize an epitope within EpCAM, such as, in some cases the EpCAM binding proteins interact with one or more amino acids found within a domain of human EpCAM. The epitope to which the antibodies bind may consist of a single contiguous sequence of 3 or more (e.g., 3, 4, 5, 6, 7, 8, 9, 10, 11, 12, 13, 14, 15, 16, 17, 18, 19, 20 or more) amino acids located within a domain of EpCAM. Alternatively, the epitope may consist of a plurality of non-contiguous amino acids (or amino acid sequences) located within a domain of EpCAM.

[0264] In some embodiments, the EpCAM binding proteins of this disclosure binds to the full length EpCAM protein or to a fragment thereof, such as epitope containing fragments within the full length EpCAM protein, as described above. In some cases, the epitope containing fragment comprises antigenic or immunogenic fragments and derivatives thereof of the EpCAM protein. Epitope containing fragments, including antigenic or immunogenic fragments, are, in some embodiments, 12 amino acids or more, e.g., 20 amino acids or more, 50 or 100 amino acids or more. The EpCAM fragments, in some embodiments, comprises 95% or more of the length of the full protein, 90% or more, 75% or 50% or 25% or 10% or more of the length of the full protein. In some embodiments, the epitope-containing fragments of EpCAM including antigenic or immunogenic fragments are capable of eliciting a relevant immune response in a patient. Derivatives of EpCAM include, in some embodiments, variants on the sequence in which one or more (e.g., 1-20 such as 15 amino acids, or up to 20% such as up to 10% or 5% or 1% by number of amino acids based on the total length of the protein) deletions, insertions or substitutions have been made to the EpCAM sequence provided in SEQ ID NOS: 3208-3214.

[0265] In another example of a substitution to create a variant anti-EpCAM antibody or antigen binding fragments thereof, one or more hypervariable region residues of a parent antibody are substituted. In general, variants are then selected based on improvements in desired properties compared to a parent antibody or antigen binding fragments thereof, for example, increased affinity, reduced affinity, reduced immunogenicity, increased pH dependence of binding.

[0266] In some embodiments, the EpCAM binding domain is a polypeptide comprising an amino acid sequence that is comprised of four framework regions/sequences (f1-f4) interrupted by three complementarity determining regions/sequences, as represented by the formula: f1-r1-f2-r2-f3-r3-f4, wherein r1, r2, and r3 are complementarity determining regions CDR1, CDR2, and CDR3, respectively, and f1, f2, f3, and f4 are framework residues. The framework residues of the EpCAM binding protein of the present disclosure comprise, for example, 75, 76, 77, 78, 79, 80, 81, 82, 83, 84, 85, 86, 87, 88, 89, 90, 91, 92, 93, or 94 amino acid residues, and the complementarity determining regions comprise, for example, 24, 25, 26, 27, 28, 29, 30, 31, 32, 33, 34, 35, or 36 amino acid residues. In some embodiments, the EpCAM binding domain comprises an amino acid sequence selected from SEQ ID NOS: 961-1003.

[0267] In some embodiments, the EpCAM binding protein comprises at least 70%, 75%, 80%, 85%, 90%, 95%, 96%, 97%, 98%, 99%, or more identity to a sequence selected from SEQ ID NOS: 961-1003, subsequences thereof, and variants thereof. In some embodiments, the EpCAM binding protein comprises at least 70%-95% or more identity to a sequence selected from SEQ ID NOS: 961-1003, subsequences thereof, and variants thereof.

[0268] In some embodiments, the CDR1 comprises the amino acid sequence as set forth in any one of SEQ ID NOS: 847-884 or a sequence comprising one or more substitutions compared to a sequence selected from the group consisting of SEQ ID NOS: 847-884. In some embodiments, the CDR2 comprises a sequence as set forth in any one of SEQ ID Nos. 885-922 or a sequence comprising one or more substitutions compared to a sequence selected from the group consisting of SEQ ID NOS: 885-922. In some embodiments, the CDR3 comprises a sequence as set forth in any one of SEQ ID NOS: 923-960 a sequence comprising one or more substitutions compared to a sequence selected from the group consisting of SEQ ID NOS: 923-960.

[0269] In various embodiments, a complementarity determining region of the EpCAM binding domain of the present disclosure is at least about 10%, about 20%, about 30%, about 40%, about 50%, about 60%, about 70%, about 80%, about 81%, about 82%, about 83%, about 84%, about 85%, about 86%, about 87%, about 88%, about 89%, about 90%, about 91%, about 92%, about 93%, about 94%, about 95%, about 96%, about 97%, about 98%, about 99%, or about 100% identical to the amino acid sequence set forth in SEQ ID NOS: 847-884.

[0270] In various embodiments, a complementarity determining region of the EpCAM binding domain of the present disclosure is at least about 10%, about 20%, about 30%, about 40%, about 50%, about 60%, about 70%, about 80%, about 81%, about 82%, about 83%, about 84%, about 85%, about 86%, about 87%, about 88%, about 89%, about 90%, about 91%, about 92%, about 93%, about 94%, about 95%, about 96%, about 97%, about 98%, about 99%, or about 100% identical to the amino acid sequence set forth in SEQ ID NOS: 885-922.

[0271] In various embodiments, a complementarity determining region of the EpCAM binding domain of the present disclosure is at least about 10%, about 20%, about 30%, about 40%, about 50%, about 60%, about 70%, about 80%, about 81%, about 82%, about 83%, about 84%, about 85%, about 86%, about 87%, about 88%, about 89%, about 90%, about 91%, about 92%, about 93%, about 94%, about 95%, about 96%, about 97%, about 98%, about 99%, or about 100% identical to the amino acid sequence set forth in SEQ ID NOS: 923-960.

[0272] In some embodiments, any of the foregoing EpCAM binding domains (e.g., anti-EpCAM single domain antibodies of SEQ ID NOS: 961-1003) are affinity peptide tagged for ease of purification. In some embodiments, the affinity peptide tag is six consecutive histidine residues, also referred to as 6X-his (SEQ ID NO: 3503).

[0273] In certain embodiments, the EpCAM binding domains of the present disclosure preferentially bind membrane bound EpCAM over soluble EpCAM Membrane bound EpCAM refers to the presence of EpCAM in or on the cell membrane surface of a cell that expresses EpCAM. Soluble EpCAM refers to EpCAM that is no longer on in or on the cell membrane surface of a cell that expresses or expressed EpCAM. In certain instances, the soluble EpCAM is present in the blood and/or lymphatic circulation in a subject. In one embodiment, the EpCAM binding domains bind membrane-bound EpCAM at least 5 fold, 10 fold, 15 fold, 20 fold, 25 fold, 30 fold, 40 fold, 50 fold, 100 fold, 500 fold, or 1000 fold greater than soluble EpCAM. In one embodiment, the EpCAM binding proteins of the present disclosure preferentially bind membrane-bound EpCAM 30 fold greater than soluble EpCAM. Determining the preferential binding of an antigen binding protein to membrane bound EpCAM over soluble EpCAM can be readily determined using binding assays.

[0274] It is contemplated that in some embodiments the EpCAM binding protein is fairly small and no more than 25 kDa, no more than 20 kDa, no more than 15 kDa, or no more than 10 kDa in some embodiments. In certain instances, the EpCAM binding protein is 5 kDa or less if it is a peptide or small molecule entity.

[0275] In other embodiments, the EpCAM binding proteins described herein comprise small molecule entity (SME) binders for EpCAM. SME binders are small molecules averaging about 500 to 2000 Da in size and are attached to the EpCAM binding proteins by known methods, such as sortase ligation or conjugation. In these instances, the EpCAM binding protein comprises a domain comprising a sortase recognition sequence, e.g., LPETG (SEQ ID NO: 3200). To attach a SME binder to EpCAM binding protein comprising a sortase recognition sequence, the protein is incubated with a sortase and a SME binder whereby the sortase attaches the SME binder to the recognition sequence. In yet other embodiments, the EpCAM binding proteins described herein comprise a knottin peptide for binding EpCAM. Knottins are disulfide-stabilized peptides with a cysteine knot scaffold and have average sizes about 3.5 kDa. Knottins have been contemplated for binding to certain tumor molecules such as EpCAM. In further embodiments, the EPCAM binding proteins described herein comprise a natural EpCAM ligand.

[0276] In some embodiments, the EpCAM binding protein comprises more than one domain and are of a single-polypeptide design with flexible linkage of the domains. This allows for facile production and manufacturing of the EpCAM binding proteins as they can be encoded by single cDNA molecule to be easily incorporated into a vector. Further, in some embodiments where the EpCAM binding proteins described herein are a monomeric single polypeptide chain, there are no chain pairing issues or a requirement for dimerization. It is contemplated that, in such embodiments, the EpCAM binding proteins described herein have a reduced tendency to aggregate.

[0277] In the EpCAM binding proteins comprising more than one domain, the domains are linked by one or more internal linker. In certain embodiments, the internal linkers are “short,” i.e., consist of 0, 1, 2, 3, 4, 5, 6, 7, 8, 9, 10, 11 or 12 amino acid residues. Thus, in certain instances, the internal linkers consist of about 12 or less amino acid residues. In the case of 0 amino acid residues, the internal linker is a peptide bond. In certain embodiments, the internal linkers are “long,” i.e., consist of 15, 20 or 25 amino acid residues. In some embodiments, the internal linkers consist of about 3 to about 15, for example 8, 9 or 10 contiguous amino acid residues. Regarding the amino acid composition of the internal linkers, peptides are selected with properties that confer flexibility to the EpCAM binding proteins, do not interfere with the binding domains as well as resist cleavage from proteases. For example, glycine and serine residues generally provide protease resistance. Examples of internal linkers suitable for linking the domains in the EpCAM binding proteins include but are not limited to (GS)ₙ (SEQ ID NO: 3859), (GGS)ₙ (SEQ ID NO: 3860), (GGGS)ₙ (SEQ ID NO: 3861), (GGSG)ₙ (SEQ ID NO: 3862), (GGSGG)ₙ (SEQ ID NO: 3863), (GGGGS)ₙ (SEQ ID NO: 3864), (GGGGG)ₙ (SEQ ID NO: 3865), or (GGG)ₙ (SEQ ID NO: 3866), wherein n is 1, 2, 3, 4, 5, 6, 7, 8, 9, or 10. In one embodiment, the linker is (GGGGSGGGGSGGGGSGGGGS)(SEQ ID NO: 3867), (GGGGSGGGGSGGGGS) (SEQ ID NO: 3868), LPETG (SEQ ID NO: 3869), (GGGGSGGGS) (SEQ ID NO: 3871) or SGGG (SEQ ID NO: 3872).

[0278] In some cases, where the EpCAM binding protein comprises more than one domain, the domains within the EpCAM binding proteins are conjugated using an enzymatic site-specific conjugation method which involves the use of a mammalian or bacterial transglutaminase enzyme. Microbial transglutaminases (mTGs) are versatile tools in modern research and biotechnology. The availability of large quantities of relatively pure enzymes, ease of use, and lack of regulation by calcium and guanosine-5′-triphosphate (GTP) has propelled mTG to be the main cross-linking enzyme used in both the food industry and biotechnology. Currently, mTGs are used in many applications to attach proteins and peptides to small molecules, polymers, surfaces, DNA, as well as to other proteins. See, e.g., Pavel Strp, Veracity of microbial transglutaminase, Bioconjugate Chem. 25, 5, 855-862.

[0279] In some examples are provided EpCAM binding proteins comprising more than one domain, wherein one of the domains comprises an acceptor glutamine in a constant region, which can then be conjugated to another domain via a lysine-based linker (e.g. any primary amine chain which is a substrate for TGase, e.g. comprising an alkylamine, oxoamine) wherein the conjugation occurs exclusively on one or more acceptor glutamine residues present in the targeting moiety outside of the antigen combining site (e.g., outside a variable region, in a constant region). Conjugation thus does not occur on a glutamine, e.g. an at least partly surface exposed glutamine, within the variable region. The EpCAM binding protein, in some examples, is formed by reacting one of the domains with a lysine-based linker in the presence of a TGase.

[0280] In some embodiments, where one or more domains within the EpCAM binding proteins are directly joined, a hybrid vector is made where the DNA encoding the directly joined domains are themselves directly ligated to each other. In some embodiments, where linkers are used, a hybrid vector is made where the DNA encoding one domain is ligated to the DNA encoding one end of a linker moiety and the DNA encoding another domain is ligated to the other end of the linker moiety.

[0281] In certain embodiments, the EpCAM binding proteins according to the present disclosure may be incorporated into immune cell engaging proteins. In some embodiments, the immune cell engaging proteins comprise a CD3 binding domain, a half-life extension domain, and an EpCAM binding domain according to this disclosure. In some embodiments, the immune cell engaging protein comprises a trispecific antibody.

### CD3 Binding Domain

[0282] The immune cell engaging protein described herein comprises an immune cell engaging domain. In some embodiments, the immune cell engaging domain comprises a natural killer (NK) cell engaging domain, a T cell engaging domain, a B cell engaging domain, a dendritic cell engaging domain, a macrophage cell engaging domain, or a combination thereof. In some embodiments, the immune cell engaging protein comprises a T-cell engaging domain. In some embodiments, the T cell engaging domain is a CD3 binding domain.

[0283] The specificity of the response of T cells is mediated by the recognition of antigen (displayed in context of a major histocompatibility complex, MHC) by the T cell receptor complex. As part of the T cell receptor complex, CD3 is a protein complex that includes a CD3γ (gamma) chain, a CD3δ (delta) chain, and two CD3ε (epsilon) chains which are present on the cell surface. CD3 associates with the α (alpha) and β (beta) chains of the T cell receptor (TCR) as well as and CD3 ζ (zeta) altogether to comprise the T cell receptor complex. Clustering of CD3 on T cells, such as by immobilized anti-CD3 antibodies leads to T cell activation similar to the engagement of the T cell receptor but independent of its clone-typical specificity.

[0284] In one aspect, the single chain variable fragment CD3 binding proteins described herein comprise a domain which specifically binds to CD3. In one aspect, the single chain variable fragment CD3 binding proteins described herein comprise a domain which specifically binds to human CD3. In one aspect, the single chain variable fragment CD3 binding proteins described herein comprise a domain which specifically binds to cynomolgus CD3. In one aspect, the single chain variable fragment CD3 binding proteins described herein comprise a domain which binds to human CD3 and cynomolgus CD3. In some embodiments, the single chain variable fragment CD3 binding proteins described herein comprise a domain which specifically binds to CD3γ. In some embodiments, the single chain variable fragment CD3 binding proteins described herein comprise a domain which specifically binds to CD36. In some embodiments, the single chain variable fragment CD3 binding proteins described herein comprise a domain which specifically binds to CD3ε.

[0285] In another aspect is provided an immune cell engaging protein comprising a single chain variable fragment CD3 binding protein according to the present disclosure. In some embodiments, the immune cell engaging protein comprising a single chain variable fragment CD3 binding protein according to the present disclosure specifically binds to the T cell receptor (TCR). In certain instances, the immune cell engaging protein comprising a single chain variable fragment CD3 binding protein according to the present disclosure binds the α chain of the TCR. In certain instances, the immune cell engaging protein comprising a single chain variable fragment CD3 binding protein according to the present disclosure binds the β chain of the TCR.

[0286] In certain embodiments, the CD3 binding domain of the immune cell engaging protein described herein exhibit not only potent CD3 binding affinities with human CD3, but show also excellent crossreactivity with the respective cynomolgus monkey CD3 proteins. In some instances, the CD3 binding domain of the immune cell engaging protein binding proteins are cross-reactive with CD3 from cynomolgus monkey. In certain instances, the Kd for binding human CD3 (hKd) is about the same as the Kd for binding cynomolgus CD3 (cKd). In certain instances, the ratio between hKd and cKd (hKd:cKd) is between about 20:1 to about 1:2.

[0287] In some embodiments, the CD3 binding domain of immune cell engaging protein can be any domain that binds to CD3 including but not limited to domains from a monoclonal antibody, a polyclonal antibody, a recombinant antibody, a human antibody, a humanized antibody. In some instances, it is beneficial for the CD3 binding domain to be derived from the same species in which the immune cell engaging protein will ultimately be used. For example, for use in humans, it may be beneficial for the CD3 binding domain to comprise human or humanized residues from the antigen binding domain of an antibody or antibody fragment.

[0288] Thus, in one aspect, the antigen-binding domain comprises a humanized or human antibody or an antibody fragment, or a murine antibody or antibody fragment. In one embodiment, the humanized or human anti-CD3 binding domain comprises one or more (e.g., all three) light chain complementary determining region 1 (LC CDR1), light chain complementary determining region 2 (LC CDR2), and light chain complementary determining region 3 (LC CDR3) of a humanized or human anti-CD3 binding domain described herein, and/or one or more (e.g., all three) heavy chain complementary determining region 1 (HC CDR1), heavy chain complementary determining region 2 (CDR2), and heavy chain complementary determining region 3 (CDR3) of a humanized or human anti-CD3 binding domain described herein, e.g., a humanized or human anti-CD3 binding domain comprising one or more, e.g., all three, LC CDRs and one or more, e.g., all three, HC CDRs.

[0289] In some embodiments, the humanized or human anti-CD3 binding domain comprises a humanized or human light chain variable region specific to CD3 where the light chain variable region specific to CD3 comprises human or non-human light chain CDRs in a human light chain framework region. In certain instances, the light chain framework region is a λ (lambda) light chain framework. In other instances, the light chain framework region is a κ (kappa) light chain framework.

[0290] In some embodiments, the humanized or human anti-CD3 binding domain comprises a humanized or human heavy chain variable region specific to CD3 where the heavy chain variable region specific to CD3 comprises human or non-human heavy chain CDRs in a human heavy chain framework region.

[0291] In certain instances, the complementary determining regions of the heavy chain and/or the light chain are derived from known anti-CD3 antibodies, such as, for example, muromonab-CD3 (OKT3), otelixizumab (TRX4), teplizumab (MGA031), visilizumab (NUVION®), SP34, TR-66 or X35-3, VIT3, BMA030 (BW264/56), CLB-T3/3, CRIS7, YTH12.5, F111-409, CLB-T3.4.2, TR-66, WT32, SPv-T3b, 11D8, XIII-141, XIII-46, XIII-87, 12F6, T3/RW2-8C8, T3/RW2-4B6, OKT3D, M-T301, SMC2, F101.01, UCHT-1 and WT-31.

[0292] In one embodiment, the anti-CD3 binding domain is a single chain variable fragment (scFv) comprising a light chain and a heavy chain of an amino acid sequence provided herein. As used herein, “single chain variable fragment” or “scFv” refers to an antibody fragment comprising a variable region of a light chain and at least one antibody fragment comprising a variable region of a heavy chain, wherein the light and heavy chain variable regions are contiguously linked via a short flexible polypeptide linker, and capable of being expressed as a single polypeptide chain, and wherein the scFv retains the specificity of the intact antibody from which it is derived. In an embodiment, the anti-CD3 binding domain comprises: a light chain variable region comprising an amino acid sequence having at least one, two or three modifications (e.g., substitutions) but not more than 30, 20 or 10 modifications (e.g., substitutions) of an amino acid sequence of a light chain variable region provided herein, or a sequence with 95-99% identity with an amino acid sequence provided herein; and/or a heavy chain variable region comprising an amino acid sequence having at least one, two or three modifications (e.g. substitutions) but not more than 30, 20 or 10 modifications (e.g., substitutions) of an amino acid sequence of a heavy chain variable region provided herein, or a sequence with 95-99% identity to an amino acid sequence provided herein. In one embodiment, the humanized or human anti-CD3 binding domain is a scFv, and a light chain variable region comprising an amino acid sequence described herein, is attached to a heavy chain variable region comprising an amino acid sequence described herein, via a scFv linker. The light chain variable region and heavy chain variable region of a scFv can be, e.g., in any of the following configurations: light chain variable region-scFv linker-heavy chain variable region or heavy chain variable region-scFv linker-light chain variable region.

[0293] In some instances, scFvs which bind to CD3 are prepared according to known methods. For example, scFv molecules can be produced by linking VH and VL regions together using flexible polypeptide linkers. The scFv molecules comprise a scFv linker (e.g., a Ser-Gly linker) with an optimized length and/or amino acid composition. Accordingly, in some embodiments, the length of the scFv linker is such that the VH or VL domain can associate intermolecularly with the other variable domain to form the CD3 binding site. In certain embodiments, such scFv linkers are “short”, i.e. consist of 0, 1, 2, 3, 4, 5, 6, 7, 8, 9, 10, 11 or 12 amino acid residues. Thus, in certain instances, the scFv linkers consist of about 12 or less amino acid residues. In the case of 0 amino acid residues, the scFv linker is a peptide bond. In some embodiments, these scFv linkers consist of about 3 to about 15, for example 8, 10 or 15 contiguous amino acid residues. Regarding the amino acid composition of the scFv linkers, peptides are selected that confer flexibility, do not interfere with the variable domains as well as allow inter-chain folding to bring the two variable domains together to form a functional CD3 binding site. For example, scFv linkers comprising glycine and serine residues generally provide protease resistance. In some embodiments, linkers in a scFv comprise glycine and serine residues. The amino acid sequence of the scFv linkers can be optimized, for example, by phage-display methods to improve the CD3 binding and production yield of the scFv. Examples of peptide scFv linkers suitable for linking a variable light chain domain and a variable heavy chain domain in a scFv include but are not limited to (GS)ₙ (SEQ ID NO: 3859), (GGS)ₙ (SEQ ID NO: 3860), (GGGS)ₙ (SEQ ID NO: 3861), (GGSG)ₙ (SEQ ID NO: 3862), (GGSGG)ₙ (SEQ ID NO: 3863), (GGGGS)ₙ (SEQ ID NO: 3864), (GGGGG)ₙ (SEQ ID NO: 3865), or (GGG)ₙ (SEQ ID NO: 3866), wherein n is 1, 2, 3, 4, 5, 6, 7, 8, 9, or 10. In one embodiment, the linker is (GGGGSGGGGSGGGGSGGGGS)(SEQ ID NO: 3867), (GGGGSGGGGSGGGGS) (SEQ ID NO: 3868), LPETG (SEQ ID NO: 3869), (GGGGSGGGS) (SEQ ID NO: 3871) or SGGG (SEQ ID NO: 3872). Variation in the linker length may retain or enhance activity, giving rise to superior efficacy in activity studies.

[0294] In some embodiments, CD3 binding domain of an immune cell engaging protein has an affinity to CD3 on CD3 expressing cells with a K_{d} of 1000 nM or less, 500 nM or less, 200 nM or less, 100 nM or less, 80 nM or less, 50 nM or less, 20 nM or less, 10 nM or less, 5 nM or less, 1 nM or less, or 0.5 nM or less. In some embodiments, the CD3 binding domain of a single chain variable fragment CD3 binding protein has an affinity to CD3ε, γ, or δ with a K_{d} of 1000 nM or less, 500 nM or less, 200 nM or less, 100 nM or less, 80 nM or less, 50 nM or less, 20 nM or less, 10 nM or less, 5 nM or less, 1 nM or less, or 0.5 nM or less. In further embodiments, CD3 binding domain of a single chain variable fragment CD3 binding protein has low affinity to CD3, i.e., about 100 nM or greater.

[0295] In certain embodiments, the single chain variable fragment CD3 binding proteins described herein bind to human CD3 with a human Kd (hKd) and to cynomolgus CD3 with a cyno Kd (cKd). In some embodiments, hKd and cKd are between about between about 1 nM to about 2 nM, about 3 nM to about 5 nM, about 6 nM to about 10 nM, about 11 nM to about 20 nM, about 25 nM to about 40 nM, about 40 nM to about 60 nM, about 70 nM to about 90 nM, about 100 nM to about 120 nM, about 125 nM to about 140 nM, about 145 nM to about 160 nM, about 170 nM and to about 200 nM, about 210 nM to about 250 nM, about 260 nM to about 300 nM.

[0296] In some embodiments, the hKd and cKd of the single chain variable fragment CD3 binding proteins is about the same as the Kd of a CD3 binding protein having the sequence as set forth is SEQ ID NO: 3167. In some embodiments, the hKd and cKd of the single chain variable fragment CD3 binding proteins is about 1.1 fold to about 1.5 fold the Kd of a CD3 binding protein having the sequence as set forth is SEQ ID NO: 3167. In some embodiments, the hKd and cKd of the single chain variable fragment CD3 binding proteins is about 1.5 fold to about 2 fold the Kd of a CD3 binding protein having the sequence as set forth is SEQ ID NO: 3167. In some embodiments, the hKd and cKd of the single chain variable fragment CD3 binding proteins is about 2.5 fold to about 3 fold the Kd of a CD3 binding protein having the sequence as set forth is SEQ ID NO: 3167. In some embodiments, the hKd and cKd of the single chain variable fragment CD3 binding proteins is about 3 fold to about 5 fold the Kd of a CD3 binding protein having the sequence as set forth is SEQ ID NO: 3167. In some embodiments, the hKd and cKd of the single chain variable fragment CD3 binding proteins is about 6 fold to about 15 fold the Kd of a CD3 binding protein having the sequence as set forth is SEQ ID NO: 3167. In some embodiments, the hKd and cKd of the single chain variable fragment CD3 binding proteins is about 15 fold to about 20 fold the Kd of a CD3 binding protein having the sequence as set forth is SEQ ID NO: 3167. In some embodiments, the hKd and cKd of the single chain variable fragment CD3 binding proteins is about 20 fold to about 50 fold the Kd of a CD3 binding protein having the sequence as set forth is SEQ ID NO: 3167. In some embodiments, the hKd and cKd of the single chain variable fragment CD3 binding proteins is about 55 fold to about 70 fold the Kd of a CD3 binding protein having the sequence as set forth is SEQ ID NO: 3167. In some embodiments, the hKd and cKd of the single chain variable fragment CD3 binding proteins is about 75 fold to about 100 fold the Kd of a CD3 binding protein having the sequence as set forth is SEQ ID NO: 3167. In some embodiments, the hKd and cKd of the single chain variable fragment CD3 binding proteins is about 120 fold to about 200 fold the Kd of a CD3 binding protein having the sequence as set forth is SEQ ID NO: 3167.

[0297] In some embodiments, the ratio between the hKd and cKd (hKd: cKd) ranges from about 20:1 to about 1:2. The affinity to bind to CD3 can be determined, for example, by the ability of the single chain variable fragment CD3 binding protein itself or its CD3 binding domain to bind to CD3 coated on an assay plate; displayed on a microbial cell surface; in solution; etc. The binding activity of the single chain variable fragment CD3 binding protein itself or its CD3 binding domain of the present disclosure to CD3 can be assayed by immobilizing the ligand (e.g., CD3) or the single chain variable fragment CD3 binding protein itself or its CD3 binding domain, to a bead, substrate, cell, etc. Agents can be added in an appropriate buffer and the binding partners incubated for a period of time at a given temperature. After washes to remove unbound material, the bound protein can be released with, for example, SDS, buffers with a high or low pH, and the like and analyzed, for example, by Surface Plasmon Resonance (SPR).

[0298] In some embodiments, the single chain variable fragment CD3 binding protein has an amino acid sequence selected from SEQ ID NOS: 3153-3169. In various embodiments, the single chain variable fragment CD3 binding protein comprises an amino acid sequence that is at least about 75%, about 76%, about 77%, about 78%, about 79%, about 80%, about 81%, about 82%, about 83%, about 84%, about 85%, about 86%, about 87%, about 88%, about 89%, about 90%, about 91%, about 92%, about 93%, about 94%, about 95%, about 96%, about 97%, about 98%, about 99%, or about 100% identical to an amino acid sequence selected from SEQ ID NOS: 3153-3169.

### Single Domain Serum Albumin Binding Protein

[0299] The immune cell engaging protein described herein is a half-life extended protein. In some embodiments, the immune cell engaging protein comprises a domain binds to serum albumin. In some embodiments, the serum albumin is human serum albumin (HSA).

[0300] Serum albumin is produced by the liver, occurs dissolved in blood plasma and is the most abundant blood protein in mammals. Albumin is essential for maintaining the oncotic pressure needed for proper distribution of body fluids between blood vessels and body tissues; without albumin, the high pressure in the blood vessels would force more fluids out into the tissues. It also acts as a plasma carrier by non-specifically binding several hydrophobic steroid hormones and as a transport protein for hemin and fatty acids. Human serum albumin (HSA) (molecular mass ˜67 kDa) is the most abundant protein in plasma, present at about 50 mg/ml (600 μM), and has a half-life of around 20 days in humans. HSA serves to maintain plasma pH, contributes to colloidal blood pressure, functions as carrier of many metabolites and fatty acids, and serves as a major drug transport protein in plasma. In some embodiments, the single domain serum albumin binding proteins bind to HSA. In some embodiments, the single domain serum albumin binding proteins bind to serum albumin protein from cynomolgus monkeys. In some embodiments, the single domain serum albumin binding proteins bind to HSA and serum albumin protein from cynomolgus monkeys. In some embodiments, the single domain serum albumin binding proteins also bind to mouse serum albumin protein. In some embodiments, the binding affinity towards mouse serum albumin is about 1.5-fold to about 20-fold weaker than that towards human or cynomolgus serum albumin.

[0301] Noncovalent association with albumin extends the elimination half-time of short-lived proteins. For example, a recombinant fusion of an albumin binding domain to a Fab fragment resulted in a decrease in in vivo clearance by 25- and 58-fold and a half-life extension of 26- and 37-fold when administered intravenously to mice and rabbits respectively as compared to the administration of the Fab fragment alone. In another example, when insulin is acylated with fatty acids to promote association with albumin, a protracted effect was observed when injected subcutaneously in rabbits or pigs. Together, these studies demonstrate a linkage between albumin binding and prolonged action/serum half-life.

[0302] In some embodiments, the single-domain serum albumin binding proteins described herein is a single domain antibody such as a heavy chain variable domain (VH), a variable domain (VHH) of camelid derived sdAb, peptide, ligand or small molecule entity specific for serum albumin. In some embodiments, the single-domain serum albumin binding proteins described herein is a single domain antibody such as a heavy chain variable domain (VH), a variable domain (VHH) of camelid derived sdAb, peptide, ligand or small molecule entity specific for HSA. In some embodiments, the serum albumin binding domain of a single domain serum albumin binding protein described herein is any domain that binds to serum albumin including but not limited to domains from a monoclonal antibody, a polyclonal antibody, a recombinant antibody, a human antibody, a humanized antibody. In certain embodiments, the serum albumin binding domain is a single-domain antibody. In other embodiments, the serum albumin binding domain is a peptide. In further embodiments, the serum albumin binding domain is a small molecule. It is contemplated that the single domain serum albumin binding protein is fairly small and no more than 25 kD, no more than 20 kD, no more than 15 kD, or no more than 10 kD in some embodiments. In certain instances, the single domain serum albumin binding protein binding is 5 kD or less if it is a peptide or small molecule entity.

[0303] In some embodiments, the single domain serum albumin binding protein described herein is a half-life extension domain which provides for altered pharmacodynamics and pharmacokinetics of the single domain serum albumin binding protein itself. As above, the half-life extension domain extends the elimination half-time. The half-life extension domain also alters pharmacodynamic properties including alteration of tissue distribution, penetration, and diffusion of the single domain serum albumin binding protein. In some embodiments, the half-life extension domain provides for improved tissue (including tumor) targeting, tissue distribution, tissue penetration, diffusion within the tissue, and enhanced efficacy as compared with a protein without a half-life extension domain. In one embodiment, therapeutic methods effectively and efficiently utilize a reduced amount of the single domain serum albumin binding protein, resulting in reduced side effects, such as reduced non-tumor cell cytotoxicity.

[0304] Further, the binding affinity of the single domain serum albumin binding protein towards its binding target can be selected so as to target a specific elimination half-time in a particular single domain serum albumin binding protein. Thus, in some embodiments, the single domain serum albumin binding protein has a high binding affinity towards its binding target. In other embodiments, the single domain serum albumin binding protein has a medium binding affinity towards its binding target. In yet other embodiments, the single domain serum albumin binding protein has a low or marginal binding affinity towards its binding target. Exemplary binding affinities include K_{D} of 10 nM or less (high), between 10 nM and 100 nM (medium), and greater than 100 nM (low). As above, binding affinities of the single domain serum albumin binding proteins towards binding targets are determined by known methods such as Surface Plasmon Resonance (SPR).

[0305] In some embodiments, the single domain serum albumin binding protein has an amino acid sequence selected from SEQ ID NOS: 3185-3193. In various embodiments, the single chain variable fragment CD3 binding protein comprises an amino acid sequence that is at least about 75%, about 76%, about 77%, about 78%, about 79%, about 80%, about 81%, about 82%, about 83%, about 84%, about 85%, about 86%, about 87%, about 88%, about 89%, about 90%, about 91%, about 92%, about 93%, about 94%, about 95%, about 96%, about 97%, about 98%, about 99%, or about 100% identical to an amino acid sequence selected from SEQ ID NOS: 3185-3193.

[0306] In some embodiments, the single domain serum albumin binding protein has an elimination half-time of at least 1 hour, at least 2 hours, at least 4 hours, at least 6 hours, at least 12 hours, at least 20 hours, at least 25 hours, at least 30 hours, at least 35 hours, at least 40 hours, at least 45 hours, at least 50 hours, or at least 100 hours.

### Immune Cell Engaging Protein Modifications

[0307] The immune cell engaging protein described herein, including antigen binding domains and immune cell engaging domains encompass derivatives or analogs in which (i) an amino acid is substituted with an amino acid residue that is not one encoded by the genetic code, (ii) the mature polypeptide is fused with another compound such as polyethylene glycol, or (iii) additional amino acids are fused to the protein, such as a leader or secretory sequence or a sequence for purification of the protein.

[0308] Typical modifications include, but are not limited to, acetylation, acylation, ADP-ribosylation, amidation, covalent attachment of flavin, covalent attachment of a heme moiety, covalent attachment of a nucleotide or nucleotide derivative, covalent attachment of a lipid or lipid derivative, covalent attachment of phosphatidylinositol, cross-linking, cyclization, disulfide bond formation, demethylation, formation of covalent crosslinks, formation of cystine, formation of pyroglutamate, formylation, gamma carboxylation, glycosylation, GPI anchor formation, hydroxylation, iodination, methylation, myristoylation, oxidation, proteolytic processing, phosphorylation, prenylation, racemization, selenoylation, sulfation, transfer-RNA mediated addition of amino acids to proteins such as arginylation, and ubiquitination.

[0309] Modifications are made anywhere in the immune cell engaging protein described herein, including the peptide backbone, the amino acid side-chains, and the amino or carboxyl termini. Certain common peptide modifications that are useful for modification of the FLT3 binding proteins include glycosylation, lipid attachment, sulfation, gamma-carboxylation of glutamic acid residues, hydroxylation, blockage of the amino or carboxyl group in a polypeptide, or both, by a covalent modification, and ADP-ribosylation.

[0310] In some embodiments, derivatives of the immune cell engaging protein as described herein comprise immunoreactive modulator derivatives and antigen binding molecules comprising one or more modifications.

[0311] In some embodiments, the immune cell engaging protein of the disclosure are monovalent or multivalent bivalent, trivalent, etc.). As used herein, the term “valency” refers to the number of potential target binding sites associated with an antibody. Each target binding site specifically binds one target molecule or specific position or locus on a target molecule. When an antibody is monovalent, each binding site of the molecule will specifically bind to a single antigen position or epitope. When an antibody comprises more than one target binding site (multivalent), each target binding site may specifically bind the same or different molecules (e.g., may bind to different ligands or different antigens, or different epitopes or positions on the same antigen).

[0312] In some embodiments, the immune cell engaging protein as set forth above are fused to an Fc region from any species, including but not limited to, human immunoglobulin, such as human IgG1, a human IgG2, a human IgG3, human IgG4, to generate Fc-fusion FLT3 binding proteins. In some embodiments, the Fc-fusion immune cell engaging protein of this disclosure have extended half-life compared to an otherwise identical immune cell engaging protein. In some embodiments, the Fc-fusion immune cell engaging protein of this disclosure contain inter alia one or more additional amino acid residue substitutions, mutations and/or modifications, e.g., in the Fc region, which result in a binding protein with preferred characteristics including, but not limited to: altered pharmacokinetics, extended serum half-life.

[0313] In some embodiments, such Fc-fused immune cell engaging protein provide extended half-lives in a mammal, such as in a human, of greater than 5 days, greater than 10 days, greater than 15 days, greater than 20 days, greater than 25 days, greater than 30 days, greater than 35 days, greater than 40 days, greater than 45 days, greater than 2 months, greater than 3 months, greater than 4 months, or greater than 5 months. The increased half-life, in some cases, results in a higher serum titer which thus reduces the frequency of the administration of the immune cell engaging protein and/or reduces the concentration of the antibodies to be administered. Binding to human FcRn in vivo and serum half-life of human FcRn high affinity binding polypeptides is assayed, in some examples, in transgenic mice or transfected human cell lines expressing human FcRn, or in primates to which the polypeptides with a variant Fc region are administered.

[0314] The immune cell engaging protein, in some cases, are differentially modified during or after production, e.g., by glycosylation, acetylation, phosphorylation, amidation, derivatization by known protecting/blocking groups, proteolytic cleavage, linkage to an antibody molecule or other cellular ligand, etc. Any of numerous chemical modifications are carried out by techniques, including but not limited, to specific chemical cleavage by cyanogen bromide, trypsin, chymotrypsin, papain, V8 protease, NaBH4, acetylation, formylation, oxidation, reduction, metabolic synthesis in the presence of tunicamycin, etc.

[0315] Various post-translational modifications of the immune cell engaging protein also encompassed by the disclosure include, for example, N-linked or O-linked carbohydrate chains, processing of N-terminal or C-terminal ends, attachment of chemical moieties to the amino acid backbone, chemical modifications of N-linked or 0-linked carbohydrate chains, and addition or deletion of an N-terminal methionine residue as a result of prokaryotic host cell expression. Moreover, the FLT3 binding proteins are, in some cases, modified with a detectable label, such as an enzymatic, fluorescent, radioisotopic or affinity label to allow for detection and isolation of the modulator.

### Peptide Mask

[0316] The extended-release binding protein described herein, in some embodiments, comprises a masking peptide. When bound to the antigen binding domain(s) of the immune cell engaging protein, the masking peptide, in some embodiments, blocks, occludes, inhibits (e.g., decreases) or otherwise prevents (e.g., masks) the activity or binding of the antigen binding domain(s) to the target(s). In some embodiments, the masking peptide interferes with the binding of the antigen binding domain to a target antigen. In some embodiments, the immune cell engaging protein comprises a CD3 binding domain and the masking peptide is specific for the CD3 binding domain and interferes with binding of the CD3 binding domain to its target.

[0317] The masking peptide, in certain instances, is covalently linked to the N-terminus or C-terminus of immune cell engaging protein, for example, through a cleavable linker. In some embodiments, the masking peptide comprises a sequence selected from the group consisting of SEQ ID NOS: 3663-3682, or a sequence comprising one or more amino acid substitutions relative to a sequence selected from the group consisting of SEQ ID NOS: 3663-3682.

[0318] In some embodiments, the masking peptide is a peptide that is 5 amino acids in length, 6 amino acids in length, 7 amino acids in length, 8 amino acids in length, 9 amino acids in length, 10 amino acids in length, 11 amino acids in length, 12 amino acids in length, 13 amino acids in length, 14 amino acids in length, or longer. In some embodiments, the masking peptide is at least 3 amino acids in length. In some embodiments, the masking peptide is 3 to 12 amino acids, 4 to 15 amino acids, 5 to 20 amino acids, or 6 to 25 amino acids, in length. In some embodiments, the masking peptide is 6 amino acids in length. In some embodiments, the masking peptide is a linear peptide or a cyclic peptide. In some embodiments, the cyclized peptide is formed by a di-sulfide bond connecting two cysteine amino acid residues. In some embodiments, the cysteine amino acid residues are terminal cysteines, located at or near the N-terminus and/or the C-terminus of the masking peptide. In some embodiments, the di-sulfide bond connects an N-terminal cysteine with a C-terminal cysteine.

[0319] In some embodiments, the masking peptide comprises a sequence selected from the group consisting of SEQ ID NOS: 3663-3682, or a sequence comprising one or more amino acid substitutions (e.g., two or three amino acid substitutions) relative to a sequence selected from the group consisting of SEQ ID NOS: 3663-3682.

### Cleavable Linker

[0320] As described above, in some embodiments, the masking peptide and the half-life extended immune cell engaging protein are connected through a cleavable linker. The cleavable linker, in some embodiments, facilitates release of an active immune cell engaging protein in a cell. Examples of cleavable linker include but are not limited to: an acid-labile linker, a peptidase-sensitive linker, a photolabile linker, a dimethyl linker or disulfide-containing linker (see, e.g., Chari et al., Cancer Res. 52:127-131 (1992); U.S. Pat. No. 5,208,020). The cleavable linker, in some embodiments, comprises a sequence that is recognized by a protease. Examples of proteases include, but are not limited to: ABHD12, ADAM12, ABHD12B, ABHD13, ABHD17A, ADAM 19, ADAM20, ADAM21, ADAM28, ADAM30, ADAM33, ADAM8, ABHD17A, ADAMDEC1, AD AMTS 1, AD AMTS 10, AD AMTS 12, AD AMTS 13, AD AMTS 14, AD AMTS 15, AD AMTS 16, AD AMTS 17, AD AMTS 18, AD AMTS 19, ADAMTS2, ADAMTS20, AD AMTS 3, AD AMTS 4, ABHD17B, AD AMTS 5, AD AMTS 6, ADAMTS 7, ADAMTS 8, ADAMTS 9, ADAMTSL1, ADAMTSL2, ADAMTSL3, ABHD17C, ADAMTSL5, ASTL, BMP1, CELA1, CELA2A, CELA2B, CELA3A, CELA3B, ADAM 10, ADAM 15, ADAM 17, ADAM9, ADAMTS4, CTSE, CTSF, ADAMTSL4, CMA1, CTRB 1, CTRC, CTSO, CTR1, CTSA, CTSW, CTSB, CTSC, CTSD, ESP1, CTSG, CTSH, GZMA, GZMB, GZMH, CTSK, GZMM, CTSL, CTSS, CTSV, CTSZ, HTRA4, KLK10, KLK11, KLK13, KLK14, KLK2, KLK4, DPP4, KLK6, KLK7, KLKB 1, ECE1, ECE2, ECEL1, MASP2, MEP1A, MEP1B, ELANE, FAP, GZMA, MMP11, GZMK, HGFAC, HPN, HTRA1, MMP11, MMP 16, MMP17, MMP 19, HTRA2, MMP20, MMP21, HTRA3, HTRA4, KEL, MMP23B, MMP24, MMP25, MMP26, MMP27, MMP28, KLK5, MMP3, MMP7, MMP8, MMP9, LGMN, LNPEP, MASP1, PAPPA, PAPPA2, PCSK1, NAPSA, PCSK5, PCSK6, MME, MMP1, MMP10, PLAT, PLAU, PLG, PRSS 1, PRSS 12, PRSS2, PRSS21, PRSS3, PRSS33, PRSS4, PRSS55, PRSS57, MMP 12, PRSS8, PRSS9, PRTN3, MMP13, MMP14, ST14, TMPRSS10, TMPRSS11A, TMPRSS11D, TMPRSS11E, TMPRSS11F, TMPRSS12, TMPRSS13, MMP15, TMPRSS15, MMP2, TMPRSS2, TMPRSS3, TMPRSS4, TMPRSS5, TMPRSS6, TMPRSS7, TMPRSS9, NRDC, OVCH1, PAMR1, PCSK3, PHEX, TINAG, TPSAB1, TPSD1, and TPSGE In some embodiments, the cleavable peptide is cleaved by one or more enzyme selected from the group consisting of: ADAM 17, HTRA1, PRSS1, FAP, GZMK, NAPSA, MMP1, MMP2, MMP9, MMP10, MMP7, MMP12, MMP28, AD AMTS 9, HGFAC, and HTRA3.

Exemplary protease recognition sequences are provided Table 1:

| SEQ | | |
|---|---|---|
| ID | | |
| No. | Description | Sequence |
| 3716 | protease cleavage site | VANLA |
| 3717 | protease cleavage site | PLGL |
| 3718 | protease cleavage site | PQAS |
| 3719 | protease cleavage site | PKPQA |
| 3720 | protease cleavage site | PTGLE |
| 3721 | protease cleavage site | PENFF |
| 3722 | protease cleavage site | AATLK |
| 3723 | protease cleavage site | PQDLL |
| 3724 | protease cleavage site | PAGL |
| 3725 | protease cleavage site | VLGL |
| 3726 | protease cleavage site | RLQLKL |
| 3727 | protease cleavage site | RTRYED |
| 3728 | protease cleavage site | KPLGL |
| 3729 | Protease: MMP7 | KRALGLPG |
| 3730 | Protease: MMP7 | (DE)8RPLALWRS(DR)8 |
| | Protease: MMP9 | PR(S/T)(L/I)(S/T) |
| 3732 | Protease: MMP9 | LEATA |
| 3733 | Protease: MMP11 | GGAANLVRGG |
| 3734 | Protease: MMP14 | SGRIGFLRTA |
| 3735 | Protease: MMP | PLGLAG |
| 3736 | Protease: MMP | PLGLAX |
| 3737 | Protease: MMP | PLGC(me)AG |
| 3738 | Protease: MMP | ESPAYYTA |
| 3739 | Protease: MMP | RLQLKL |
| 3740 | Protease: MMP | RLQLKAC |
| 3741 | Protease: MMP2, MMP9, | EP(Cit)G(Hof)YL |
| | MMP14 | |
| 3742 | Protease: Urokinase | SGRSA |
| | plasminogen | |
| | activator (uPA) | |
| 3743 | Protease: Urokinase | DAFK |
| | plasminogen | |
| | activator (uPA) | |
| 3744 | Protease: Urokinase | GGGRR |
| | plasminogen | |
| | activator (uPA) | |
| 3745 | Protease: Lysosomal Enzyme | GFLG |
| 3746 | Protease: Lysosomal Enzyme | ALAL |
| | Protease: Lysosomal Enzyme | FK |
| | Protease: Cathepsin B | NLL |
| 3749 | Protease: Cathepsin D | PIC(Et)FF |
| 3750 | Protease: Cathepsin K | GGPRGLPG |
| 3751 | Protease: Prostate | HSSKLQ |
| | Specific Antigen | |
| 3752 | Protease: Prostate | HSSKLQL |
| | Specific Antigen | |
| 3753 | Protease: Prostate | HSSKLQEDA |
| | Specific Antigen | |
| 3754 | Protease: Herpes Simplex | LVLASSSFGY |
| | Virus Protease | |
| 3755 | Protease: HIV Protease | GVSQNYPIVG |
| 3756 | Protease: CMV Protease | GVVQASCRLA |
| | Protease: Thrombin | F(Pip)RS |
| 3758 | Protease: Thrombin | DPRSFL |
| 3759 | Protease: Thrombin | PPRSFL |
| 3760 | Protease: Caspase-3 | DEVD |
| 3761 | Protease: Caspase-3 | DEVDP |
| 3762 | Protease: Caspase-3 | KGSGDVEG |
| 3763 | Protease: Interleukin | GWEHDG |
| | 1β converting | |
| | enzyme | |
| 3764 | Protease: Enterokinase | EDDDDKA |
| 3765 | Protease: FAP | KQEQNPGST |
| 3766 | Protease: Kallikrein 2 | GKAFRR |
| 3767 | Protease: Plasmin | DAFK |
| 3768 | Protease: Plasmin | DVLK |
| 3769 | Protease: Plasmin | DAFK |
| 3770 | Protease: TOP | ALLLALL |

[0321] In some embodiments, a linker as described herein comprises a sequence selected from the sequences provided in Table 2. In some embodiments, a linker as described herein further comprises sequences flanked on the N-terminal and/or C-terminal. In some embodiments, the flanked sequences may be (but are not limited to) the following: GGGG (SEQ ID NO: 3883), GGGS (SEQ ID NO: 3884), GGGT (SEQ ID NO: 3885), GGGGG (SEQ ID NO: 3886), GGGGS (SEQ ID NO: 3887), and/or GGGGT (SEQ ID NO: 3888).

TABLE 2
Selected linker sequences

| SEQ ID | | |
|---|---|---|
| NO: | Description | Sequence |
| 3683 | non-cleavable | SGGGGSGGVV |
| 3684 | non-cleavable | SGGGGSGGGGSGGGGS |
| 3685 | non-cleavable | SGGGGSGGGGSGGGGGS |
| 3686 | non-cleavable | SGGGGSGGGS |
| 3687 | non-cleavable | GGGGSGGGGSGGGGSGGG |
| 3688 | L001 | KPLGLQARVV |
| 3689 | L040 | PQASTGRSGG |
| 3690 | L041 | PQGSTGRAAG |
| 3691 | L042 | PPASSGRAGG |
| 3692 | L043 | PQGSTARSAG |
| 3693 | L045 | PIPVQGRAH |
| 3694 | L054 | VANLASTGRA |
| 3695 | L055 | PLGLSTGRA |
| 3696 | L056 | PQASTGRA |
| 3697 | L057 | PKPQASTGRA |
| 3698 | L058 | PTGLESTGRA |
| 3699 | L059 | PENFFSTGRA |
| 3700 | L060 | AATLKSTGRA |
| 3701 | L061 | PQDLLSTGRA |
| 3702 | L062 | PAGLSTGRA |
| 3703 | L063 | VLGLSTGRA |
| 3704 | L064 | VANLASTGA |
| 3705 | L065 | PLGLSTGA |
| 3706 | L066 | PQASTGA |
| 3707 | L067 | PKPQASTGA |
| 3708 | L068 | PTGLESTGA |
| 3709 | L069 | PENFFSTGA |
| 3710 | L070 | AATLKSTGA |
| 3711 | L071 | PQDLLSTGA |
| 3712 | L072 | PAGLSTGA |
| 3713 | L073 | VLGLSTGA |
| 3714 | L075 | RTRYEDGGS |
| 3715 | L076 | PQASTGGSG |
| 3878 | L085 | KPLGLQAGVV |

### Polynucleotides Encoding the Extended-Release Binding Protein

[0322] Also provided, in some embodiments, are polynucleotide molecules encoding the extended-release binding protein described herein. In some embodiments, the polynucleotide molecules are provided as a DNA construct. In other embodiments, the polynucleotide molecules are provided as a messenger RNA transcript.

[0323] The polynucleotide molecules are constructed by known methods such as by combining the genes encoding the immune cell engaging protein or gene encoding various domains of the immune cell engaging protein comprising more than one domain. In some embodiments, the gene encoding the domains are either separated by peptide linkers or, in other embodiments, directly linked by a peptide bond, into a single genetic construct operably linked to a suitable promoter, and optionally a suitable transcription terminator, and expressing it in bacteria or other appropriate expression system such as, for example CHO cells. Depending on the vector system and host utilized, any number of suitable transcription and translation elements, including constitutive and inducible promoters, may be used. The promoter is selected such that it drives the expression of the polynucleotide in the respective host cell.

[0324] In some embodiments, the polynucleotide coding for an extended-release binding protein as described herein is inserted into a vector, preferably an expression vector, which represents a further embodiment. This recombinant vector can be constructed according to known methods. Vectors of particular interest include plasmids, phagemids, phage derivatives, virii (e.g., retroviruses, adenoviruses, adeno-associated viruses, herpes viruses, lentiviruses, and the like), and cosmids.

[0325] A variety of expression vector/host systems may be utilized to contain and express the polynucleotide encoding the polypeptide of the described immune cell engaging protein. Examples of expression vectors for expression in E. coli are pSKK (Le Gall et al., J Immunol Methods. (2004) 285(1):111-27) or pcDNA5 (Invitrogen) for expression in mammalian cells.

[0326] Thus, the extended-release binding protein as described herein, in some embodiments, are produced by introducing a vector encoding the protein as described above into a host cell and culturing said host cell under conditions whereby the protein domains are expressed, may be isolated and, optionally, further purified.

Protein with Masking Peptide

[0327] Described herein is a pharmaceutical composition comprising a protein which comprises a binding moiety, a masking peptide, and a cleavable linker. Without being bound by any theory, it is contemplated that the protein with the masking peptide described herein is able to reduce target-mediated drug disposition when administered to a subject by gradually releasing the active form of the binding moiety when it is in systemic circulation.

[0328] In some aspects, the cleavable linker is significantly cleaved in systemic circulation. In some aspects, the half-life of the protein described herein in systemic circulation is longer than a comparable protein without the masking peptide. In some aspects, a comparable protein without the masking peptide has a nonlinear pharmacokinetics (PK) across a dose range evaluated, and the protein described herein has an improved linearity of PK across the dose range evaluated compared to the comparable protein. In some aspects, the molar amount of the protein's binding moiety bound to the target when administered to the subject is lower compared to the molar amount of a binding moiety of a comparable protein without the masking peptide when administered to the subject at a same dose level. In some aspects, the binding rate between the protein's binding moiety and the target when administered to the subject is lower compared to the binding rate between a binding moiety of a comparable protein without the masking peptide and the target. FIG. 30 provides exemplary constructs of the protein with masking peptide described herein.

### Targets

[0329] The binding moiety of the protein with masking peptide descried herein may bind to various targets. A non-exhaustive list of the targets is ICOS (inducible T cell co-stimulator, CD278), OX40 (CD134, TNFRSF4, tumor necrosis factor receptor superfamily member 4), CD40 (TNFRSF5, tumor necrosis factor receptor superfamily member 5), DR5 (death receptor 5, TRAIL receptor 2), GITR (glucocorticoid-induced TNFR-related protein, TNFRSF18, tumor necrosis factor receptor superfamily member 18), and 4-1BB (CD137, TNFRSF9, tumor necrosis factor receptor superfamily member 9).

[0330] In some embodiments, the target may be ICOS. ICOS is a T-cell specific, CD28-superfamily costimulatory molecule and immune checkpoint protein. ICOS is normally expressed on certain activated T cells and plays a key role in the proliferation and activation of T cells.

[0331] In some embodiments, the target may be OX40. OX40 is a cell surface glycoprotein and member of the tumor necrosis factor receptor superfamily (TNFRSF). OX40 is expressed on T lymphocytes and plays an essential role in T-cell activation. Co-stimulation of activated T cells with agonistic monoclonal antibodies (mAb) against the tumor necrosis factor receptor superfamily member OX40 offers a novel immunotherapeutic approach to cancer. OX40 engagement may co-stimulate effector T cells and deplete regulatory T cells, resulting in enhanced tumor immunity.

[0332] In some embodiments, the target may be CD40. CD40 is a stimulatory receptor and a member of the tumor necrosis factor (TNF) receptor superfamily. CD40 is expressed on various immune cells, such as macrophages, dendritic cells and various tumor cell types, such as many B-cell malignancies, and some solid tumors. CD40 plays a key role in the activation of the immune system, mediates both indirect tumor cell killing through the activation of the immune system and direct tumor cell apoptosis. CD40 is highly expressed on most B-lineage hematologic malignancies including multiple myeloma, non-Hodgkin lymphoma, chronic lymphocytic leukemia, Hodgkin disease and acute lymphoblastic leukemia.

[0333] In some embodiments, the target may be DR5. DR5, also known as TRAIL receptor 2 (TRAILR2) and tumor necrosis factor receptor superfamily member 10B (TNFRSF10B), is a cell surface receptor of the TNF-receptor superfamily that binds TRAIL and mediates apoptosis. DR5 contains an intracellular death domain. DR5 can be activated by tumor necrosis factor-related apoptosis inducing ligand (TNFSF10/TRAIL/APO-2L), and transduces apoptosis signal. TRAIL, a member of the TNF superfamily of cytokines, plays a key role in the induction of apoptosis through TRAIL-mediated death receptor pathways.

[0334] In some embodiments, the target may be GITR (glucocorticoid-induced tumor necrosis factor receptor; tumor necrosis factor superfamily, member 18; TNFRSF18). GITR is a TNF receptor superfamily costimulatory molecule expressed primarily by regulatory T cells (Treg), effector T cells, and natural killer cells that inhibits the suppressive activity of Tregs. Agonistic antibodies or GITR ligand binding to GITR in concert with T cell receptor (TCR) stimulation causes activation of the MAPK/ERK pathway and NFkB, resulting in augmentation of T cell proliferation and proinflammatory cytokine production and enhanced anti-tumor effector function, as well as resistance of CD4+ and CD8+ T cells to Treg suppression. In tumor models, signaling through GITR has been shown to inhibit Treg proliferation, induce Treg depletion, and cause tumor regression.

[0335] In some embodiments, the target may be 4-1BB. 4-1BB is a member of the tumor necrosis factor (TNF)/nerve growth factor (NGF) family of receptors and is expressed by activated T- and B-lymphocytes and monocytes. 4-1BB's ligand has been found to play an important role in the regulation of immune responses.

### Antibodies

[0336] The protein with the masking peptide described herein may include an antibody. A non-exhaustive list of the antibody is GSK3359609 (GSK609, feladilimab), PF-8600 (PF-04518600, ivuxolimab), JNJ-64457107 (JNJ-107, JNJ 7107, ADC-1013, mitazalimab), CP-870,893, SGN-40 (huS2C6, Dacetuzumab), MEDI3039, ABBV-621 (eftozanermin alfa, APG880), MED11873 (efgivanermin alfa), AMG 228, PF-05082566 (Utomilumab, uto), and urelumab (BMS-663513).

[0337] In some embodiments, the antibody may be GSK3359609 (GSK609, feladilimab). GSK3359609 is an agonistic antibody for the inducible T-cell co-stimulator (ICOS; CD278), with potential immune checkpoint inhibitory and antineoplastic activities. Upon administration, GSK3359609 targets and binds to ICOS expressed on tumor infiltrating CD4-positive T cells. This stimulates ICOS-positive T-cell proliferation, enhances cytotoxic T-lymphocyte (CTL) survival and increases CTL-mediated immune responses against tumor cells.

[0338] In some embodiments, the antibody may be PF-8600 (PF-04518600, ivuxolimab). PF-8600 is a fully human agonist IgG2 mAb that targets the co-stimulatory receptor OX40 (CD134; TNFRSF4), with potential immunostimulatory activity. Upon administration, PF-8600 selectively binds to and activates OX40; which induces proliferation of memory and effector T lymphocytes. In the presence of tumor-associated antigens (TAAs), this may promote a T-cell-mediated immune response against TAA-expressing tumor cells.

[0339] In some embodiments, the antibody may be JNJ-64457107 (JNJ-107, JNJ 7107, ADC-1013, mitazalimab). JNJ-64457107 is a human immunoglobulin (Ig) G1 monoclonal antibody directed against the cell surface receptor CD40 with potential immunostimulatory and antineoplastic activities. Upon intratumoral administration, JNJ-64457107 binds to CD40 on antigen-presenting dendritic cells, which leads to the activation and proliferation of effector and memory T cells, and enhances the immune response against tumor cells. In addition, this agent binds to the CD40 antigen present on the surfaces of tumor cells, which induces antibody-dependent cytotoxicity (ADCC). This eventually inhibits the proliferation of CD40-expressing tumor cells.

[0340] In some embodiments, the antibody may be CP-870,893. CP-870,893 is a fully human monoclonal antibody (mAb) agonist of the cell surface receptor CD40 with potential immunostimulatory and antineoplastic activities. Similar to the CD40 ligand (CD40L or CD154), CP-870,893 binds to CD40 on a variety of immune cell types, triggering the cellular proliferation and activation of antigen-presenting cells (APCs), activating B cells and T cells, and enhancing the immune response; in addition, this agent may activate CD40 present on the surfaces of some solid tumor cells, resulting in apoptosis and decreased tumor growth.

[0341] In some embodiments, the antibody may be SGN-40 (huS2C6, Dacetuzumab). SGN-40 is a humanized monoclonal antibody directed against the CD40 receptor with potential antineoplastic activity. SGN-40 specifically binds to and inhibits the CD40 receptor, thereby inducing apoptosis and inhibiting cellular proliferation via antibody-dependent cellular cytotoxicity (ADCC) in cells that overexpress this receptor.

[0342] In some embodiments, the antibody may be MEDI3039. MEDI3039 is a highly potent multivalent DR5 agonist. MEDI3039 is a modified protein derived from the third fibronectin type III domain of the glycoprotein tenascin C, which possesses a region similar to the variable region characteristic of antibodies. An optimized multivalent DR5 agonist was highly potent in triggering cell death in multiple TRAIL-sensitive cell lines, was one to two orders of magnitude more potent than TRAIL, and showed promising results in multiple cancer cells (colon, lung, leukemia, liver cancers) and in vivo colon cancer models.

[0343] In some embodiments, the antibody may be ABBV-621 (eftozanermin alfa, APG880). ABBV-621 is a fusion protein composed of a tumor necrosis factor (TNF)-related apoptosis-inducing ligand (TRAIL) receptor agonist consisting of six receptor binding domains (RBDs) of TRAIL fused to the Fc-domain of a human immunoglobulin G1 (IgG1) antibody, with potential pro-apoptotic and antineoplastic activities. Upon administration, ABBV-621 binds to TRAIL-receptors, pro-apoptotic death receptors (DRs) TRAIL-R1 (death receptor 4; DR4) and TRAIL-R2 (death receptor 5; DR5), expressed on tumor cells, thereby inducing tumor cell apoptosis. ABBV-621 is designed to maximize receptor clustering for optimal efficacy.

[0344] In some embodiments, the antibody may be MEDI1873 (efgivanermin alfa). MEDI1873 is a homogenous hexameric agonist fusion protein composed of the extracellular domain (ECD) of the T-cell costimulatory receptor human GITR ligand (GITRL) and an immunoglobulin (Ig) G1 Fc domain, with potential immunomodulating and antineoplastic activities. Upon administration, MEDI1873 binds to and activates GITR found on multiple types of T cells, thereby inducing both the activation and proliferation of tumor antigen-specific T-effector cells. This abrogates the suppression of T-effector cells which is induced by inappropriately activated T-regulatory cells (Tregs), suppresses Tregs and decreases Treg tumor infiltration, and activates the immune system to help eradicate tumor cells.

[0345] In some embodiments, the antibody may be AMG 228. AMG 228 is an agonistic human IgG1 monoclonal antibody that binds to human GITR similar to MEDI1873.

[0346] In some embodiments, the antibody may be PF-05082566 (Utomilumab, uto). PF-05082566 is a humanized agonist IgG2 monoclonal antibodies for the tumor necrosis factor superfamily receptors 4-1BB. PF-05082566's binding to human 4-1BB results in NF-κB activation and downstream cytokine production in cell lines and primary lymphocytes. PF-05082566 can induce human leukocyte proliferation and has demonstrated significant antitumor activity as a single agent in human peripheral blood lymphocyte (PBL) SCID xenograft tumor models.

[0347] In some embodiments, the antibody may be urelumab. Urelumab is a humanized agonistic monoclonal antibody targeting the 4-1BB receptor with potential immunostimulatory and antineoplastic activities. Urelumab specifically binds to and activates 4-1BB-expressing immune cells, stimulating an immune response, in particular a cytotoxic T cell response, against tumor cells.

### Methods of Treatment

[0348] Also provided herein, in some embodiments, are methods and uses for stimulating the immune system of an individual in need thereof comprising administration of an extended-release binding protein and the protein with masking peptide as described herein. In some instances, administration induces and/or sustains cytotoxicity towards a cell expressing a target antigen. In some instances, the cell expressing a target antigen is a cancer or tumor cell, a virally infected cell, a bacterially infected cell, an autoreactive T or B cell, damaged red blood cells, arterial plaques, or fibrotic tissue. In some embodiments, the target antigen is an immune checkpoint protein.

[0349] Also provided herein are methods and uses for a treatment of a disease, disorder or condition associated with a target antigen comprising administering to an individual in need thereof an extended-release binding protein and the protein with masking peptide as described herein. Diseases, disorders or conditions associated with a target antigen include, but are not limited to, viral infection, bacterial infection, auto-immune disease, transplant rejection, atherosclerosis, or fibrosis. In other embodiments, the disease, disorder or condition associated with a target antigen is a proliferative disease, a tumorous disease, an inflammatory disease, an immunological disorder, an autoimmune disease, an infectious disease, a viral disease, an allergic reaction, a parasitic reaction, a graft-versus-host disease or a host-versus-graft disease. In one embodiment, the disease, disorder or condition associated with a target antigen is cancer. In one embodiment, the cancer is a hematological cancer. In one embodiment, the cancer is a melanoma. In one embodiment, the cancer is lung cancer. In one embodiment, the cancer is ovarian cancer. In one embodiment, the cancer is prostate cancer. In one embodiment, the cancer is pancreatic cancer. In one embodiment, the cancer is mesothelioma. In one embodiment, the cancer is neuroendocrine cancers. In one embodiment, the cancer is multiple myeloma. In one embodiment, the cancer is breast cancer.

[0350] As used herein, in some embodiments, “treatment” or “treating” or “treated” refers to therapeutic treatment wherein the object is to slow (lessen) an undesired physiological condition, disorder or disease, or to obtain beneficial or desired clinical results. For the purposes described herein, beneficial or desired clinical results include, but are not limited to, alleviation of symptoms; diminishment of the extent of the condition, disorder or disease; stabilization (i.e., not worsening) of the state of the condition, disorder or disease; delay in onset or slowing of the progression of the condition, disorder or disease; amelioration of the condition, disorder or disease state; and remission (whether partial or total), whether detectable or undetectable, or enhancement or improvement of the condition, disorder or disease. Treatment includes eliciting a clinically significant response without excessive levels of side effects. Treatment also includes prolonging survival as compared to expected survival if not receiving treatment. In other embodiments, “treatment” or “treating” or “treated” refers to prophylactic measures, wherein the object is to delay onset of or reduce severity of an undesired physiological condition, disorder or disease, such as, for example is a person who is predisposed to a disease (e.g., an individual who carries a genetic marker for a disease such as breast cancer).

[0351] In some embodiments of the methods described herein, the extended-release binding proteins and the protein with masking peptide described herein are administered in combination with an agent for treatment of the particular disease, disorder or condition. Agents include but are not limited to, therapies involving antibodies, small molecules (e.g., chemotherapeutics), hormones (steroidal, peptide, and the like), radiotherapies (γ-rays, X-rays, and/or the directed delivery of radioisotopes, microwaves, UV radiation and the like), gene therapies (e.g., antisense, retroviral therapy and the like) and other immunotherapies. In some embodiments, the extended-release binding proteins described herein are administered in combination with anti-diarrheal agents, anti-emetic agents, analgesics, opioids and/or non-steroidal anti-inflammatory agents. In some embodiments, the conditionally active binding proteins described herein is administered before, during, or after surgery.

[0352] Administration of the extended-release binding protein and the protein with masking peptide described herein can be effected by different ways, e.g. by intravenous, intraperitoneal, subcutaneous, intramuscular, topical or intradermal administration. In some embodiments, the route of administration depends on the kind of therapy and the kind of compound contained in the pharmaceutical composition. In some embodiments, the extended-release binding protein is injected or injectable.

### EXAMPLES

[0353] The examples below further illustrate the described embodiments without limiting the scope of the disclosure.

### Example 1: Exemplary Constructs of an Extended-Release Binding Protein

[0354] An exemplary construct of an extended-release binding protein is shown in FIG. 1. TriTAC-XR is a tri-specific binding protein with anti-target, anti-albumin and anti-CD3 binding capabilities. The intact form of the extended-release binding protein (FIG. 1A) comprises a CD3 mask linked to the binding protein with a cleavable linker. When the cleavable linker is gradually cleaved in the subject, it releases the active version of the extended-release binding protein (FIG. 1B). FIG. 1C shows the predicted concentrations of the intact version and the active version in systemic circulation after multiple administration events. FIG. 1D shows the predicted concentration of the active version of a corresponding antigen binding protein without the masking peptide in systemic circulation after multiple administration events.

[0355] Additional extended-release binding protein constructs are shown in FIGS. 2A-L with various configurations of the anti-target, anti-albumin and anti-CD3 binding domains. FIGS. 2A-C and FIGS. 2G-I illustrate the intact versions and FIGS. 2D-F and FIGS. 2J-L illustrate the active versions after cleavage of the linker.

### Example 2: Production and Purification of the Extended-Release Binding Proteins Used in the Present Study

[0356] Protein Production: Sequences of exemplary TriTAC-XR molecules were cloned into mammalian expression vector pcDNA3.4 (Invitrogen) preceded by a leader sequence and followed by a 6× histidine tag (SEQ ID NO: 3870). Expi293F cells (Life Technologies A14527) were maintained in suspension in between 0.2 to 8×10⁶ cells/ml in Expi293 media. Purified plasmid DNA was transfected into Expi293 cells in accordance with Expi293 Expression System Kit (Life Technologies, A14635) protocols, and maintained for 4-6 days post transfection. The amount of the exemplary TriTAC-XR proteins in conditioned media was quantitated using an Octet RED96 instrument with Protein A tips (ForteBio/Sartorius) using a control trispecific protein for a standard curve.

[0357] Protein Purification: Conditioned media from either host cell was filtered and partially purified by affinity and desalting chromatography. TriTAC-XR proteins were subsequently polished by ion exchange and upon fraction pooling formulated in a neutral buffer containing excipients. Final purity was assessed by SDS-PAGE and analytical SEC using an Acquity BEH SEC 200 1.7u 4.6×150 mm column (Waters Corporation) resolved in an aqueous/organic mobile phase with excipients at neutral pH on a 1290 LC system and peaks integrated with Chemstation CDS software (Agilent).

### Example 3: PSMA Targeting Extended-Release Binding Proteins Induced T Cell-Dependent Cellular Cytotoxicity Assay

[0358] The binding proteins used in this study are summarized in Table 3. Stub:T:A:C is a PSMA binding protein without the masking domain. As described herein, stub refers to the residual linker remaining on the active drug fragment after protease cleavage. Peptide:NCLV is a PSMA binding protein with a peptide mask and non-cleavable linker. Peptide:L001 is a PSMA targeting extended-release binding protein with a peptide mask and linker L001, which is a cleavable linker. Ion exchange chromatography profiles (FIG. 3) demonstrate the purity of the PSMA targeting proteins and also show that there is little or no active drug present (stub:T:A:C) in the purified peptide:L001 protein.

TABLE 3
PSMA Binding Proteins and EC₅₀ values

| | | | Fold over |
|---|---|---|---|
| Protein | SEQ ID NO | EC₅₀ (pM) | stub:T:A:C |
| stub:T:A:C | 3609 | 5 | 1 |
| peptide:NCLV | 3601 | 6256 | 1249 |
| peptide:L001 | 3600 | 81 | 16 |

[0359] TDCC Assay: For functional potency in a T cell-dependent cellular cytotoxicity assays, soluble test molecules shown in Table 3 were incubated in multi-well plates, with purified resting human T cells (effector cell) and MDAPCa2b cancer cells at 10:1 effector: target cell ratio for 48 h at 37° C. in the presence of 15 mg/ml human serum albumin (HSA). The MDAPCa2b cells had been stably transduced with a luciferase reporter gene to allow specific T cell-mediated cell killing measurement by Steady-Glo (Promega). Results shown in FIG. 4 demonstrates slow activation of peptide masked PSMA targeting extended-release binding proteins in TDCC assay. The EC₅₀ values are provided in Table 3. The efficiency of masking is quantitated by the fold increase in EC₅₀ of peptide:NCLV (SEQ ID NO: 3601) or peptide:L001 (SEQ ID NO: 3600) over stub:T:A:C (SEQ ID NO: 3609) (Table 3).

### Example 4: PSMA Targeting Extended-Release Binding Proteins with Different Peptide Mask Sequences Induced T Cell-Dependent Cellular Cytotoxicity Assay

[0360] The binding proteins with various masking peptides used in this study are summarized in Table 4. The configuration of the anti-target, anti-albumin and anti-CD3 binding domains are according to FIG. 2A (SEQ ID NOS: 3601 to 3608) and FIG. 2D (SEQ ID NO: 3609) except SEQ ID NO: 3610, which is a ProTriTAC molecule. Description a ProTriTAC molecule's structure can be found in WO2019222283A1, which is incorporated herein by reference.

TABLE 4
PSMA Binding Proteins and EC₅₀ values

| | | | Fold |
|---|---|---|---|
| | | | in- |
| | | | crease |
| | | | in |
| | | | EC₅₀ |
| SEQ | | | over |
| ID | | EC₅₀ | SEQ ID |
| NO | Protein | (M) | NO 3609 |
| 3601 | QDGNEE:NCLV:αPSMA:αALB:αCD3 | 1E−09 | 720 |
| 3602 | LDGNEE:NCLV:αPSMA:αALB:αCD3 | 7E−12 | 5 |
| 3603 | PDGNEE:NCLV:αPSMA:αALB:αCD3 | 7E−12 | 5 |
| 3604 | DDGNEE:NCLV:αPSMA:αALB:αCD3 | 3E−12 | 2 |
| 3605 | EDGNEE:NCLV:αPSMA:αALB:αCD3 | 8E−12 | 5 |
| 3606 | QEGNEE:NCLV:αPSMA:αALB:αCD3 | 2E−10 | 160 |
| 3607 | QDANEE:NCLV:αPSMA:αALB:αCD3 | 2E−10 | 130 |
| 3608 | QDSNEE:NCLV:αPSMA:αALB:αCD3 | 1E−11 | 8 |
| 3609 | stub:αPSMA:αALB:αCD3 | 1E−12 | 1 |
| 3610 | αALB-MASK027::NCLV:αPSMA: | 2E−10 | 170 |
| | αALB:αCD3 | | |

[0361] TDCC Assay: For functional potency in a T cell-dependent cellular cytotoxicity assays, soluble test molecules shown in Table 4 were incubated in multi-well plates, with purified resting human T cells (effector cell) and LNCaP cancer cells at 10:1 effector: target cell ratio for 48-72 h at 37° C. Human serum albumin is present. The cancer target cell lines had been stably transduced with a luciferase reporter gene to allow specific T cell-mediated cell killing measurement by Steady-Glo (Promega). Results shown in FIG. 5 demonstrates the masking effects of various peptide masks. The EC₅₀ values are provided in Table 4. The efficiency of masking is quantitated by the fold increase in EC₅₀ of SEQ ID Nos 3601 to 3608 and 3610 over SEQ ID NO 3609 (Table 4). The results show that masking sequences QDGNEE (SEQ ID NO: 3068), QDANEE (SEQ ID NO: 3672) and QEGNEE (SEQ ID NO: 3669) provide the most efficient masking effect.

### Example 5: MSLN Targeting Extended-Release Binding Proteins with Different Peptide Mask Sequences Induced T Cell-Dependent Cellular Cytotoxicity Assay

[0362] The binding proteins with various masking peptides used in this study are summarized in Table 5. The configuration of the anti-target, anti-albumin and anti-CD3 binding domains are according to FIG. 2A (SEQ ID NOS: 3659 to 3661) or FIG. 2D (SEQ ID NO: 3662).

TABLE 5
MSLN Binding Proteins and EC₅₀ values

| | | | | with | increase |
|---|---|---|---|---|---|
| | | | | BSA | in EC₅₀ |
| | | | | fold | with |
| | | | | increase | HSA |
| | | | | in EC₅₀ | fold |
| | | | | over | over |
| | | | | SEQ | SEQ |
| SEQ | | EC₅₀ | EC₅₀ | ID | ID |
| ID | | BSA | HSA | NO | NO |
| NO | Protein | (M) | (M) | 3662 | 3662 |
| 3659 | QEGNEE:NCLV: | 2E−11 | 9E−11 | 15 | 25 |
| | αMSLN:αALB: | | | | |
| | αCD3 | | | | |
| 3660 | QDANEE:NCLV: | 1E−11 | 1E−10 | 14 | 26 |
| | αMSLN:αALB: | | | | |
| | αCD3 | | | | |
| 3661 | QDGNEE:NCLV: | 1E−09 | 2E−09 | 1124 | 525 |
| | αMSLN:αALB: | | | | |
| | αCD3 | | | | |
| 3662 | stub:αMSLN: | 1E−12 | 4E−12 | 1 | 1 |
| | αALB:αCD3 | | | | |

[0363] TCC Assay: or functional potency in a cell-dependent cellular cytotoxicity assays, soluble test molecules shown in Table 5 were incubated, in multi-well plates, with purified resting human T cells (effector cell) and OVCAR8 cancer cells at 10:1 effector: target cell ratio for 48 h at 37° C. Bovine serum albumin (BSA) or HSA were present at 15 mg/ml. The cancer target cell lines had been stably transduced with a luciferase reporter gene to allow specific T cell-mediated cell killing measurement by Steady-Glo (Promega). Results shown in FIGS. 6A-B demonstrates the masking effects of various peptide masks. The EC₅₀ values are provided in Table 5. The efficiency of masking is quantitated by the fold increase in EC₅₀ of SEQ ID NOS: 3659 to 3661 over SEQ ID NO 3663 (Table 5).

### Example 6: CD19 Targeting Extended-Release Binding Proteins with Different Domain Configurations Induced T Cell-Dependent Cellular Cytotoxicity Assay

[0364] The binding proteins used in this study are summarized in Table 6. The configuration of the anti-target, anti-albumin and anti-CD3 binding domains are according to FIGS. 2A-C and FIGS. 2G-I (SEQ ID NOS: 3627 to 3631) and FIGS. 2D-F and FIGS. 2J-L (SEQ ID NOS: 3632 to 3636). SEQ ID NOS: 3627 to 3631 contain a masking domain and anon-cleavable linker. SEQ ID NOS: 3632 to 3636 are genetically engineered to encode the product after protease cleavage if the molecules had been made with a cleavable linker (stub: Active molecules).

TABLE 6
CD19 Binding Proteins and EC₅₀ values

| NCLV | stub:Active | | NCLV | | |
|---|---|---|---|---|---|
| SEQ ID | SEQ ID | | EC50 | stub:Active | NCLV/ |
| NO | NO | Protein Name | (M) | EC50 (M) | stub:Active |
| 3626 | 3632 | αCD19 A:C:T | 1E−09 | 8E−11 | 17 |
| 3627 | 3633 | αCD19 A:T:C | 3E−10 | 3E−11 | 9 |
| 3628 | 3634 | αCD19 C:A:T | >1E−8 | 4E−11 | >270 |
| 3629 | 3635 | αCD19 C:T:A | >1E−8 | 1E−10 | >80 |
| 3630 | 3611 | αCD19 T:A:C | >1E−8 | 2E−11 | >420 |
| 3631 | 3636 | αCD19 T:C:A | >1E−8 | 1E−11 | >870 |

[0365] TDCC Assay: For functional potency in a T cell-dependent cellular cytotoxicity assays, soluble test molecules shown in Table 6 were incubated, in multi-well plates, with purified resting human T cells (effector cell) and Raji cancer cells at 10:1 effector: target cell ratio for 72 h at 37° C. HSA was present. The cancer target cell lines had been stably transduced with a luciferase reporter gene to allow specific T cell-mediated cell killing measurement by Steady-Glo (Promega). Results shown in FIG. 7 demonstrates the TDCC assay results of various CD19 targeting proteins. The EC₅₀ values are provided in Table 6. The efficiency of masking is quantitated by the fold increase in EC₅₀ of the NCLV protein over the stub:Active protein (Table 6). Results shows that T:A:C and T:C:A configurations have low double digit picomolar stub: active EC₅₀ and no activity when masked with a NCLV linker, while A:C:T and A:T:C configurations have poor masking effects.

### Example 7: FLT3 Targeting Extended-Release Binding Proteins with Different Domain Configurations Induced T Cell-Dependent Cellular Cytotoxicity Assay

[0366] The binding proteins used in this study are summarized in Table 7. The configuration of the anti-target, anti-albumin and anti-CD3 binding domains are according to FIGS. 2A-C and FIGS. 2G-I (SEQ ID NOS: 3648 to 3653) and FIGS. 2D-F and FIG. 2J-L (SEQ ID NOS: 3654 to 3658). SEQ ID NOS: 3648 to 3653 contain a masking domain and a non-cleavable linker. SEQ ID NOS: 3654 to 3658 are genetically engineered to encode the product after protease cleavage if the molecules had been made with a cleavable linker (stub:Active molecules). The FLT3 binder used in this study is 19C (SEQ ID NO: 1076).

TABLE 7
FLT3 Binding Proteins and EC₅₀ values

| NCLV | stub:Active | | NCLV | | NCLV/ |
|---|---|---|---|---|---|
| SEQ ID | SEQ ID | | EC50 | stub:Active | stub |
| NO | NO | Protein Name | (M) | EC50 (M) | Active |
| 3648 | 3654 | αFLT3-H19C A:C:T | >1E−8 | 2E−09 | >7 |
| 3649 | 3655 | αFLT3-H19C A:T:C | ~1E−8 | 8E−10 | ~13 |
| 3650 | 3656 | αFLT3-H19C C:A:T | >1E−8 | 2E−10 | >50 |
| 3651 | 3657 | αFLT3-H19C C:T:A | >1E−8 | 5E−10 | >20 |
| 3652 | 3613 | αFLT3-H19C T:A:C | >1E−8 | 5E−11 | >210 |
| 3653 | 3658 | αFLT3-H19C T:C:A | >1E−8 | 3E−10 | >30 |

[0367] TDCC Assay: For functional potency in a T cell-dependent cellular cytotoxicity assays, soluble test molecules shown in Table 7 were incubated, in multi-well plates, with purified resting human T cells (effector cell) and MOLM13 cancer cells at 10:1 effector: target cell ratio for 48-72 h at 37° C. HSA was present. The cancer target cell lines had been stably transduced with a luciferase reporter gene to allow specific T cell-mediated cell killing measurement by Steady-Glo (Promega). Results shown in FIG. 8 demonstrates the TDCC assay results of various FLT3 targeting proteins. The EC₅₀ values are provided in Table 7. The efficiency of masking is quantitated by the fold increase in EC₅₀ of the NCLV protein over the stub:Active protein (Table 7). Results shows that TAC configuration has ˜50 picomolar EC₅₀ in the stub:Active form and no activity when masked with a NCLV linker, while A:C:T and A:T:C configurations have poor masking effects.

### Example 8: FLT3 Targeting Extended-Release Binding Proteins with Different Domain Configurations Induced T Cell-Dependent Cellular Cytotoxicity Assay

[0368] The binding proteins used in this study are summarized in Table 8. The configuration of the anti-target, anti-albumin and anti-CD3 binding domains are according to FIGS. 2A-C and FIGS. 2G-I (SEQ ID NOS 3637 to 3642) and FIGS. 2D-F and FIGS. 2J-L (SEQ ID NOS 3643 to 3647). SEQ ID NOS: 3637 to 3642 contain a masking domain and a non-cleavable linker. SEQ ID NOS 3643 to 3647 are genetically engineered to encode the product after protease cleavage if the molecules had been made with a cleavable linker (stub:Active molecules). The FLT3 binder used in this study is 107 (SEQ ID NO: 1074).

TABLE 8
FLT3 Binding Proteins and EC₅₀ values

| NCLV | stub:Active | | NCLV | | NCLV/ |
|---|---|---|---|---|---|
| SEQ ID | SEQ ID | | EC50 | stub:Active | stub |
| NO | NO | Protein Name | (M) | EC50 (M) | Active |
| 3637 | 3643; | αFLT3-H107 | 4E−10 | Not | N/A |
| | did not | A:C:T | | Tested | |
| | express | | | | |
| 3638 | 3644 | αFLT3-H107 | 3.6E−10 | 5E−12 | 70 |
| | | A:T:C | | | |
| 3639 | 3645 | αFLT3-H107 | >1E−8 | 7E−12 | >1500 |
| | | C:A:T | | | |
| 3640 | 3646 | αFLT3-H107 | >1E−8 | 5E−12 | >2000 |
| | | C:T:A | | | |
| 3641 | 3612 | αFLT3-H107 | >1E−8 | 8E−12 | >1200 |
| | | T:A:C | | | |
| 3642 | 3647 | αFLT3-H107 | >1E−8 | 7E−12 | >1500 |
| | | T:C:A | | | |

[0369] TDCC Assay: For functional potency in a T cell-dependent cellular cytotoxicity assays, soluble test molecules shown in Table 8 were incubated, in multi-well plates, with purified resting human T cells (effector cell) and MOLM13 cancer cells at 10:1 effector: target cell ratio for 48 h at 37° C. HSA was present. The cancer target cell lines had been stably transduced with a luciferase reporter gene to allow specific T cell-mediated cell killing measurement by Steady-Glo (Promega). Results shown in FIG. 9 demonstrates the TDCC assay results of various FLT3 targeting proteins. The EC₅₀ values are provided in Table 8. The efficiency of masking is quantitated by the fold increase in EC₅₀ of the NCLV protein over the stub:Active protein (Table 8). Results shows that 4 configurations (C:A:T, C:T:A, T:A:C and T:C:A) have single digit picomolar Active EC₅₀ in the active form and no activity when masked with a NCLV linker, while the A:T:C configuration has poor masking. The stub_A:C:T configuration did not express, so masking efficiency in the A:C:T configuration could not be assessed.

### Example 9: CD33 Targeting Extended-Release Binding Proteins with Different Domain Configurations Induced T Cell-Dependent Cellular Cytotoxicity Assay

[0370] The binding proteins used in this study are summarized in Table 9. The configuration of the anti-target, anti-albumin and anti-CD3 binding domains are according to FIGS. 2A-C and FIGS. 2G-I (SEQ ID NOS 3614 to 3619) and FIGS. 2D-F and FIG. 2J-L (SEQ ID NOS 3620 to 3625). SEQ ID NOS: 3614 to 3619 contain a masking domain and a non-cleavable linker. SEQ ID NOS 3620 to 3625 are genetically engineered to encode the product after protease cleavage if the molecules had been made with a cleavable linker (stub:Active molecules).

TABLE 9
CD33 Binding Proteins and EC₅₀ values

| NCLV | stub:Active | | NCLV | | |
|---|---|---|---|---|---|
| SEQ ID | SEQ ID | | EC50 | stub:Active | NCLV/ |
| NO | NO | Protein Name | (M) | EC50 (M) | stub:Active |
| 3614 | 3620 | αCD33 A:C:T | 2E−10 | 2E−11 | 13 |
| 3615 | 3621 | αCD33 A:T:C | 1E−10 | 4E−12 | 64 |
| 3616 | 3622 | αCD33 C:A:T | >1E−7 | 4E−11 | >2500 |
| 3617 | 3623 | αCD33 C:T:A | >1E−7 | 2E−11 | >4200 |
| 3618 | 3624 | αCD33 T:A:C | >1E−7 | 8E−11 | >1300 |
| 3619 | 3625 | αCD33 T:C:A | >1E−7 | 7E−12 | >15000 |

[0371] TDCC Assay: For functional potency in a T cell-dependent cellular cytotoxicity assays, soluble test molecules shown in Table 9 were incubated, in multi-well plates, with purified resting human T cells (effector cell) and MOLM13 cancer cells at 10:1 effector: target cell ratio for 48 h at 37° C. HSA was present. The cancer target cell lines had been stably transduced with a luciferase reporter gene to allow specific T cell-mediated cell killing measurement by Steady-Glo (Promega). Results shown in FIG. 10 demonstrates the TDCC assay results of various CD33 targeting proteins. The EC₅₀ values are provided in Table 9. The efficiency of masking is quantitated by the fold increase in EC₅₀ of the NCLV protein over the stub:Active protein (Table 9). Results shows that 4 configurations (C:A:T, C:T:A, T:A:C and T:C:A) have single digit picomolar Active EC₅₀ in the active form and no activity when masked with a NCLV linker, while A:C:T and A:T:C configurations have poor masking effects.

### Example 10: TDCC Activity of the Protease Activated Extended-Release Binding Proteins

[0372] CD19-targeting extending-release binding proteins in the T:A:C or T:C:A (FIGS. 2A and B) configurations were expressed and purified. For each configuration, four different versions of protein were produced. The first versions (SEQ ID NOS: 3842 and 3843) contained a protease cleavage site, L001 (SEQ ID NO: 3688), between the masking domain (SEQ ID NO: 3663) and the CD19 targeting domain. The second versions were identical to the first version except that the protein was treated with the ST14 protease. The third versions (SEQ ID NOS: 3630 and 3631) contained a non-cleavage linker (SEQ ID NO: 3687) between the masking domain and the targeting domain. The fourth versions (SEQ ID NOS: 3611 and 3636) were engineered with the amino acid sequence VVGGGG (SEQ ID NO: 3879), referred to as “stub”, on the N-terminus of the target binding domain to product of an extended-binding release protein after protease cleavage (FIGS. 2D and E). These proteins were tested in a Raji TDCC assay as described in Example 6 and the Raji cell viability data versus the concentration of CD19 protein added is plotted in FIG. 11. As expected, the CD19 binding proteins activated with protease or the stub CD19 proteins potently and effectively directed the T cells to kill the Raji cells. CD19 binding proteins with a non-cleavage linker were unable to direct T cells to kill the Raji cells. CD19 proteins with a cleavable linker but not treated with protease were able to partially direct T cells to kill the Raji cells. It is hypothesized that during this 72 hour assay that these proteins became partially activated because of proteases produced by the T cells and/or Raji cells.

[0373] FLT3-targeting extending-release binding proteins in the T:A:C (FIG. 2A) configuration were expressed and purified. Four different versions of proteins were produced. The first version (SEQ ID NO: 3854) contained a protease cleavage linker L001 (SEQ ID NO: 3688) (and flanking sequence at the N-terminal and C-terminal of L001), between the masking domain (SEQ ID NO: 3633) and the FLT3 targeting domain. The second version was identical to the first version except that the protein was treated with the ST14 protease. The third version (SEQ ID NO: 3652) contained a non-cleavage linker (SEQ ID NO: 3687) between the masking domain and the targeting domain. The fourth version (SEQ ID NO: 3613) was engineered with the amino acid sequence VVGGGG (SEQ ID NO: 3879), referred to as “stub”, on the N-terminus of the target binding domain to product of an extended-binding release protein after protease cleavage (FIG. 2D). These proteins were tested in a MOLM13 TDCC assay as described in Example 6 and the MOLM13 cell viability data versus the concentration of FLT3 protein added is plotted in FIG. 12. As expected, the FLT3 binding protein activated with protease or the stub FLT3 protein potently and effectively directed the T cells to kill the MOLM13 cells. FLT3 binding protein with a non-cleavage linker was unable to direct T cells to kill the MOLM13 cells. FLT3 protein with a cleavable linker but not treated with protease were able to direct T cells to kill the MOLM13 cells but with less potency than the stub or protease activated proteins. It is hypothesized that during this 72 hour assay that these proteins became partially activated because of proteases produced by the T cells and/or MOLM13 cells.

### Example 11: Binding of TriTAC-XR Prodrug and Activated Drug to Human CD3ε by ELISA

[0374] Exemplary TriTAC-XR with a non-cleavable (NCLV) linker (SEQ ID NO: 3630), a cleavable linker (SEQ ID NO: 3876), or an stub:Active control (SEQ ID NO: 3611) were assessed for binding to recombinant human CD3ε using ELISA. The results are shown in FIG. 13A. The mask reduced the binding to human CD3ε by more than 100-fold.

### Example 12: Binding of TriTAC-XR Prodrug and Activated Drug to Human T Cells by Flow Cytometry

[0375] Exemplary TriTAC-XR with a non-cleavable (NCLV) linker (SEQ ID NO: 3630), a cleavable linker (SEQ ID NO: 3876), or an stub:Active control (SEQ ID NO: 3611) were assessed for binding to human T cells using flow cytometry. The results are shown in FIG. 13B. The mask reduced the binding to human T cells by more than 100-fold.

### Example 13: Pharmacokinetics and Pharmacodynamics of FLT3 TriTAC-XR in Cynomolgus Monkeys

[0376] FLT3 TriTAC-XR-L001 (SEQ ID NO: 3873) or FLT3 TriTAC-XR-L085 (SEQ ID NO: 3874) was administered via single i.v. bolus injection to cynomolgus monkeys. FLT3 TriTAC-XR-L001 was administered at 300 and 1000 μg/kg and FLT3 TriTAC-XR-L085 was administered at 1000 μg/kg with two test subjects per dose group. FLT3 TriTAC binds to cynomolgus FLT3, CD3, and albumin with affinities of 2.7 nM, 3.3 nM and 4.4 nM, respectively, as determined using biolayer interferometry. FLT3 TriTAC-XR molecules have similar affinity to FLT3 and albumin as TriTAC, but reduced binding to CD3 due to the presence of a peptide mask, see examples 11 and 12.

[0377] The total amount of intact and active FLT3 TriTAC-XR (L001, SEQ ID NO: 3873, and L085, SEQ ID NO: 3874) present in serum samples was measured using an electrochemiluminescent ELISA assay using labeled antibodies recognizing non-overlapping epitopes on the anti-ALB domain of the TriTAC-XR molecule as capture and detection reagents. The amount of activated FLT3 TriTAC-XR present in serum samples was measured using an electrochemiluminescent ELISA assay using labeled antibodies recognizing the anti-ALB domain and the anti-CD3 domain of the TriTAC-XR molecule as capture and detection reagents. The antibody recognizing the anti-CD3 domain is blocked by the mask in the intact prodrug, resulting in 400× preferential detection of active drug. The amount of intact prodrug was calculated by subtracting the active drug concentration from the total drug concentration. The measured and calculated serum concentrations versus time are plotted in FIGS. 14A-14C. The active form of the drug formed slowly after dosing, reaching a maximum concentration approximately 72 to 144 hours after dosing.

[0378] To determine if the FLT3 TriTAC-XR directed cynomolgus T cells to kill endogenous cynomolgus FLT3-expressing cells, soluble FLT3L in serum and FLT3 RNA in bone marrow were measured in samples collected from the pharmacokinetic study described above. Depletion of FLT3-expressing cells should result in an increase in soluble FLT3L (Brauchle et al., Mol Cancer Ther 2020; 19:1875-88). An electrochemiluminescent ELISA specific for Non-Human Primate FLT3L (Meso Scale Discovery) was used to measure the levels of FLT3L in serum samples collected at different time points (FIG. 15). For all dose groups, the soluble FLT3L increased for the first 336 to 504 hours before declining back to baseline by 672 to 1176 hours.

[0379] If FLT3 expressing cells are depleted from bone marrow, then FLT3 transcripts should be depleted from RNA purified from bone marrow. RNA was purified from bone marrow using kits (Qiagen), cDNA was prepared by a reverse transcriptase reaction, and qPCR was used to measure the amount of FLT3 present using a standard curve qPCR method. FNTA was used as a house keeping gene for the qPCR reactions. Plotted in FIG. 16 are FTL3 RNA levels normalized to FNTA for bone marrow samples isolated from animals treated with TriTAC-XR. Compared to samples collected prior to dosing, FLT3 RNA is greatly reduced at all time points measured. The combined FLT3L (FIG. 15) and FLT3 RNA (FIG. 16) data indicate that the FLT3 TriTAC-XR-L001 (SEQ ID NO: 3873) and FLT3 TriTAC-XR-L085 (SEQ ID NO: 3874) reduced FLT3 expressing cells in cynomolgus monkeys.

### Example 14: Pharmacokinetics of FLT3 TriTAC in Cynomolgus Monkeys

[0380] FLT3 TriTAC (SEQ ID NO: 3875) was administered via single i.v. bolus injection to cynomolgus monkeys at 1 mg/kg. Serum concentrations of the TriTAC were measured for 15 days at the indicated timepoints (FIG. 17). To compare the FLT3 TriTAC with TriTAC-XR-L001, the first 15 days of FLT3 TriTAC-XR data from Example 13 were plotted in FIG. 18. The results show that TriTAC-XR resulted in a slow build-up of active drug, and a reduced Cmax/Cmin ratio for the active drug (FIG. 17) compared to the TriTAC. Plotted in FIG. 18 are FTL3 RNA levels normalized to FNTA for bone marrow samples isolated from animals treated with TriTAC or TriTAC-XR (from Example 13). The FLT3 transcription levels in animals dosed i.v. with 1000 μg/kg FLT3 TriTAC-XR-L001 (SEQ ID NO: 3873) were compared to the FLT3 transcription levels in animals dosed i.v. with a constitutively active FLT3 TriTAC (SEQ ID NO: 3875). Compared to samples collected prior to dosing, FLT3 RNA is greatly reduced at all time points measured. The FLT3 RNA (FIG. 18) data indicate that the FLT3 TriTAC-XR-L001 (SEQ ID NO: 3873) and the constitutively active FLT3 TriTAC (SEQ ID NO: 3875) reduced FLT3 expressing cells in cynomolgus monkeys.

### Example 15: Safety and Efficacy of FLT3 TriTAC-XR in Cynomolgus Monkeys

[0381] To assess the safety improvement of TriTAC-XR, cytokines were measured at multiple timepoints between 2 and 48 hours after dosing. Cytokines levels were quantified using electrochemiluminescent ELISAs specific for Non-Human Primate IL-2 and IL-6 (Meso Scale Discovery). The peak cytokine levels in animals dosed i.v. with 300 and 1000 μg/kg FLT3 TriTAC-XR (FLT3 TriTAC-XR-L001, SEQ ID NO: 3873) were compared to the peak cytokine levels in animals dosed i.v. with a constitutively active FLT3 TriTAC (SEQ ID NO 3875) at 10, 100, and 1000 μg/kg and are shown in FIGS. 21A and 21B (IL-2 in FIG. 21A, IL-6 in FIG. 21B). Significant cytokines were generated from the constitutively active TriTAC at 100-fold lower doses than the TriTAC-XR-L001.

[0382] To assess the efficacy of TriTAC-XR, soluble FLT3L in serum were measured in samples collected from the safety study described above. Depletion of FLT3-expressing cells should result in an increase in soluble FLT3L (Brauchle et al. Mol Cancer Ther 2020; 19:1875-88). An electrochemiluminescent ELISA specific for Non-Human Primate FLT3L (Meso Scale Discovery) was used to measure the levels of FLT3L in serum samples collected at the indicated timepoints after dosing (FIG. 22). The soluble FLT3L levels in animals dosed i.v. with 300 and 1000 μg/kg FLT3 TriTAC-XR (FLT3 TriTAC-XR-L001, SEQ ID NO: 3873) were compared to the soluble FLT3L levels in animals dosed i.v. with a constitutively active FLT3 TriTAC (SEQ ID NO: 3875) at 10, 100, and 1000 μg/kg and are shown in FIG. 22. FLT3L was significantly elevated after administration of 100 and 1000 μg/kg TriTAC and 300 and 1000 μg/kg TriTAC-XR. (FIG. 22).

### Example 16: Efficacy of FLT3 TriTAC-XR in Mouse

[0383] All animal experiments were conducted according to the protocol approved by Institutional Animal Care and Use Committee of Harpoon Therapeutics (protocol number HAR-001-2019). Animals were purchased from The Jackson Laboratory then housed in a pathogen free animal facility located at Harpoon Therapeutics in accordance with IACUC guidelines. All studies were performed in NSG™ (NOD-scid IL2Rgamma^{null}) female mice 8 weeks of age with n=5 mice per group.

[0384] EoL-1 human eosinophilic leukemia cells (2×10⁶) were implanted intravenously in NSG™ mice on Day 0, followed by intraperitoneally implanted activated and expanded human T cells (2×10⁷) on Day 2. On Day 4, mice were administered a repeat intraperitoneal dose (q.d.×10) of non-targeting GFP TriTAC (SEQ ID NO: 3877) or FLT3 targeting TriTAC-XR (SEQ ID NO: 3873). Clinical observations were recorded and body weight was monitored at least three times weekly. Survival analysis of EoL-1 disseminated mouse model demonstrated FLT3 TriTAC-XR extends survival (FIG. 23). Statistical significance was determined using Survival Curve Comparisons Log-rank (Mantel-Cox) and Gehan-Breslow-Wilcoxon tests, all groups compared to control non-targeting GFP TriTAC (**, P<0.01, FIG. 23).

### Example 17: Pharmacokinetics of CD19 TriTAC-XR in Cynomolgus Monkeys

[0385] CD19 TriTAC-XR (CD19 TriTAC-XR-L001, SEQ ID NO: 3842) or a constitutively active CD19 TriTAC (SEQ ID NO: 3611) was administered via single i.v. bolus injection to cynomolgus monkeys at 0.3 mg/kg. Serum concentrations of each drug were measured for 168 hours at the indicated timepoints (FIG. 24). For TriTAC-XR, two assays were used to quantify the Intact Prodrug and the Activated drug. After administration, the Intact Prodrug of TriTAC-XR is slowly cleaved, generating Active drug. The results show that TriTAC-XR resulted in a slow build-up of active drug, (FIG. 24) compared to the TriTAC.

### Example 18: Safety and Efficacy of CD19 TriTAC-XR in Cynomolgus Monkeys

[0386] To assess the safety improvement of TriTAC-XR, cytokines were measured at multiple timepoints after dosing. Cytokines levels were quantified using electrochemiluminescent ELISAs specific for Non-Human Primate IL2 and IL6 (Meso Scale Discovery). The peak cytokine levels in animals dosed i.v. with 300 μg/kg CD19 TriTAC-XR (CD19 TriTAC-XR-L001, SEQ ID NO: 3842) were compared to the peak cytokine levels in animals dosed i.v. with 300 μg/kg of a constitutively active CD19 TriTAC (SEQ ID NO: 3611) are shown in FIGS. 25A and B (IL-2 in FIG. 25A, IL-6 in FIG. 25B). Significant cytokines were generated from the constitutively active TriTAC. FIG. 26 shows that target cell (B cell) depletion is comparable between CD19 TriTAC and CD19 TriTAC-XR.

### Example 19: Pharmacokinetics of CD20 TriTAC-XR in Cynomolgus Monkeys

[0387] CD20 TriTAC-XR (CD20 TriTAC-XR-L001, SEQ ID NO: 3882) or a constitutively active CD20 TriTAC (SEQ ID NO: 3881) was administered via single i.v. bolus injection to cynomolgus monkeys at 0.03 mg/kg. Serum concentrations of each drug were measured for 120 hours at the indicated timepoints (FIG. 27). For TriTAC-XR, two assays were used to quantify the Intact Prodrug and the Activated drug. After administration, the Intact Prodrug of TriTAC-XR is slowly cleaved, generating Active drug. The results show that TriTAC-XR resulted in a slow build-up of active drug, (FIG. 27) compared to the TriTAC.

### Example 20: Safety and Efficacy of CD20 TriTAC-XR in Cynomolgus Monkeys

[0388] To assess the safety improvement of TriTAC-XR, cytokines were measured at multiple timepoints after dosing. Cytokines levels were quantified using electrochemiluminescent ELISAs specific for Non-Human Primate IL2 and IL6 (Meso Scale Discovery). The peak cytokine levels in animals dosed i.v. with 30 μg/kg CD20 TriTAC-XR (CD20 TriTAC-XR-L001, SEQ ID NO: 3882) were compared to the peak cytokine levels in animals dosed i.v. with a constitutively active CD20 TriTAC (SEQ ID NO: 3881) are shown in FIGS. 28A and B (IL-2 in FIG. 28A, IL-6 in FIG. 28B). Significant cytokines were generated from the constitutively active TriTAC. FIG. 29 shows that target cell (B cell) depletion is comparable between CD20 TriTAC and CD20 TriTAC-XR.

### Example 21. Predicted and Empirical PK Profiles

[0389] Based on the observation above, weekly repeat dosing of (1) intravenous administered TriTAC, (2) subcutaneous administered TriTAC, (3) and intravenous administered TriTAC-XR was modeled from single dose cynomolgus monkey pharmacokinetics data (FIG. 19). In vivo activated TriTAC-XR is predicted to have a lower Cmax, but similar Cmin to intravenous administered or subcutaneous administered TriTAC (FIG. 19). Repeated dosing of CD20 TriTAC-XR in cyno monkeys show a PK profile similar to the predicted PK profile where concentration of TriTAC-XR active drug in circulation (“apparent half-life”) is near constant due to continual conversion of prodrug to active drug (FIG. 20).

[0390] While preferred embodiments of the present invention have been shown and described herein, it will be obvious to those skilled in the art that such embodiments are provided by way of example only. Numerous variations, changes, and substitutions will now occur to those skilled in the art without departing from the invention. It should be understood that various alternatives to the embodiments of the invention described herein may be employed in practicing the invention. It is intended that the following claims define the scope of the invention and that methods and structures within the scope of these claims and their equivalents be covered thereby.

Sequence Listing Tables

Lengthy table referenced here
US20240216518A1-20240704-T00001
Please refer to the end of the specification for access instructions.

Lengthy table referenced here
US20240216518A1-20240704-T00002
Please refer to the end of the specification for access instructions.

Lengthy table referenced here
US20240216518A1-20240704-T00003
Please refer to the end of the specification for access instructions.

Lengthy table referenced here
US20240216518A1-20240704-T00004
Please refer to the end of the specification for access instructions.

Lengthy table referenced here
US20240216518A1-20240704-T00005
Please refer to the end of the specification for access instructions.

Lengthy table referenced here
US20240216518A1-20240704-T00006
Please refer to the end of the specification for access instructions.

Lengthy table referenced here
US20240216518A1-20240704-T00007
Please refer to the end of the specification for access instructions.

Lengthy table referenced here
US20240216518A1-20240704-T00008
Please refer to the end of the specification for access instructions.

Lengthy table referenced here
US20240216518A1-20240704-T00009
Please refer to the end of the specification for access instructions.

Lengthy table referenced here
US20240216518A1-20240704-T00010
Please refer to the end of the specification for access instructions.

Lengthy table referenced here
US20240216518A1-20240704-T00011
Please refer to the end of the specification for access instructions.

Lengthy table referenced here
US20240216518A1-20240704-T00012
Please refer to the end of the specification for access instructions.

Lengthy table referenced here
US20240216518A1-20240704-T00013
Please refer to the end of the specification for access instructions.

Lengthy table referenced here
US20240216518A1-20240704-T00014
Please refer to the end of the specification for access instructions.

Lengthy table referenced here
US20240216518A1-20240704-T00015
Please refer to the end of the specification for access instructions.

Lengthy table referenced here
US20240216518A1-20240704-T00016
Please refer to the end of the specification for access instructions.

Lengthy table referenced here
US20240216518A1-20240704-T00017
Please refer to the end of the specification for access instructions.

LENGTHY TABLES
The patent application contains a lengthy table section. A copy of the table is available in electronic form from the USPTO web site (https://seqdata.uspto.gov/?pageRequest=docDetail&DocID=US20240216518A1). An electronic copy of the table will also be available from the USPTO upon request and payment of the fee set forth in 37 CFR 1.19(b)(3).

The application's sequence listing, which the Patent Office published only in electronic form, follows.

SEQUENCE LISTING (3888 sequences)

SEQ ID NO: 1 - protein, 10 aa, synthetic construct
  REGION 1..10: note = Description of Artificial Sequence: Synthetic peptide
TDIFSISPMG

SEQ ID NO: 2 - protein, 10 aa, synthetic construct
  REGION 1..10: note = Description of Artificial Sequence: Synthetic peptide
TNIFSSSPMG

SEQ ID NO: 3 - protein, 10 aa, synthetic construct
  REGION 1..10: note = Description of Artificial Sequence: Synthetic peptide
TNIFSISPGG

SEQ ID NO: 4 - protein, 10 aa, synthetic construct
  REGION 1..10: note = Description of Artificial Sequence: Synthetic peptide
TNIFMISPMG

SEQ ID NO: 5 - protein, 10 aa, synthetic construct
  REGION 1..10: note = Description of Artificial Sequence: Synthetic peptide
TNIFSSSPMG

SEQ ID NO: 6 - protein, 10 aa, synthetic construct
  REGION 1..10: note = Description of Artificial Sequence: Synthetic peptide
TNIFSIRPMG

SEQ ID NO: 7 - protein, 10 aa, synthetic construct
  REGION 1..10: note = Description of Artificial Sequence: Synthetic peptide
TNISSISPMG

SEQ ID NO: 8 - protein, 10 aa, synthetic construct
  REGION 1..10: note = Description of Artificial Sequence: Synthetic peptide
TNIFSSSPMG

SEQ ID NO: 9 - protein, 10 aa, synthetic construct
  REGION 1..10: note = Description of Artificial Sequence: Synthetic peptide
TNIFSITPMG

SEQ ID NO: 10 - protein, 10 aa, synthetic construct
  REGION 1..10: note = Description of Artificial Sequence: Synthetic peptide
TNIPSISPMG

SEQ ID NO: 11 - protein, 10 aa, synthetic construct
  REGION 1..10: note = Description of Artificial Sequence: Synthetic peptide
TNITSISPMG

SEQ ID NO: 12 - protein, 10 aa, synthetic construct
  REGION 1..10: note = Description of Artificial Sequence: Synthetic peptide
TNIFSKSPMG

SEQ ID NO: 13 - protein, 10 aa, synthetic construct
  REGION 1..10: note = Description of Artificial Sequence: Synthetic peptide
TNDFSISPMG

SEQ ID NO: 14 - protein, 10 aa, synthetic construct
  REGION 1..10: note = Description of Artificial Sequence: Synthetic peptide
TNITSISPMG

SEQ ID NO: 15 - protein, 10 aa, synthetic construct
  REGION 1..10: note = Description of Artificial Sequence: Synthetic peptide
TNIFSISPMG

SEQ ID NO: 16 - protein, 10 aa, synthetic construct
  REGION 1..10: note = Description of Artificial Sequence: Synthetic peptide
TNIFSRSPMG

SEQ ID NO: 17 - protein, 10 aa, synthetic construct
  REGION 1..10: note = Description of Artificial Sequence: Synthetic peptide
TNIESISPMG

SEQ ID NO: 18 - protein, 10 aa, synthetic construct
  REGION 1..10: note = Description of Artificial Sequence: Synthetic peptide
SNIFSISPMG

SEQ ID NO: 19 - protein, 10 aa, synthetic construct
  REGION 1..10: note = Description of Artificial Sequence: Synthetic peptide
TNIFSTSPMG

SEQ ID NO: 20 - protein, 10 aa, synthetic construct
  REGION 1..10: note = Description of Artificial Sequence: Synthetic peptide
TNIVSISPMG

SEQ ID NO: 21 - protein, 10 aa, synthetic construct
  REGION 1..10: note = Description of Artificial Sequence: Synthetic peptide
TNIESISPMG

SEQ ID NO: 22 - protein, 10 aa, synthetic construct
  REGION 1..10: note = Description of Artificial Sequence: Synthetic peptide
TNIPSISPMG

SEQ ID NO: 23 - protein, 10 aa, synthetic construct
  REGION 1..10: note = Description of Artificial Sequence: Synthetic peptide
TNIFSSSPMG

SEQ ID NO: 24 - protein, 10 aa, synthetic construct
  REGION 1..10: note = Description of Artificial Sequence: Synthetic peptide
TNIFSISPMG

SEQ ID NO: 25 - protein, 10 aa, synthetic construct
  REGION 1..10: note = Description of Artificial Sequence: Synthetic peptide
TNIFSIYPMG

SEQ ID NO: 26 - protein, 10 aa, synthetic construct
  REGION 1..10: note = Description of Artificial Sequence: Synthetic peptide
TNIFSNSPMG

SEQ ID NO: 27 - protein, 10 aa, synthetic construct
  REGION 1..10: note = Description of Artificial Sequence: Synthetic peptide
TNISSISPMG

SEQ ID NO: 28 - protein, 10 aa, synthetic construct
  REGION 1..10: note = Description of Artificial Sequence: Synthetic peptide
TNIVSISPMG

SEQ ID NO: 29 - protein, 10 aa, synthetic construct
  REGION 1..10: note = Description of Artificial Sequence: Synthetic peptide
TNIFSNSPMG

SEQ ID NO: 30 - protein, 10 aa, synthetic construct
  REGION 1..10: note = Description of Artificial Sequence: Synthetic peptide
TNITSISPMG

SEQ ID NO: 31 - protein, 10 aa, synthetic construct
  REGION 1..10: note = Description of Artificial Sequence: Synthetic peptide
TNIFSDSPMG

SEQ ID NO: 32 - protein, 10 aa, synthetic construct
  REGION 1..10: note = Description of Artificial Sequence: Synthetic peptide
TNIFSRSPMG

SEQ ID NO: 33 - protein, 10 aa, synthetic construct
  REGION 1..10: note = Description of Artificial Sequence: Synthetic peptide
TNIFSASPMG

SEQ ID NO: 34 - protein, 10 aa, synthetic construct
  REGION 1..10: note = Description of Artificial Sequence: Synthetic peptide
TNIFSASPMG

SEQ ID NO: 35 - protein, 10 aa, synthetic construct
  REGION 1..10: note = Description of Artificial Sequence: Synthetic peptide
TNITSISPMG

SEQ ID NO: 36 - protein, 10 aa, synthetic construct
  REGION 1..10: note = Description of Artificial Sequence: Synthetic peptide
TNIASISPMG

SEQ ID NO: 37 - protein, 10 aa, synthetic construct
  REGION 1..10: note = Description of Artificial Sequence: Synthetic peptide
TNIFSRSPMG

SEQ ID NO: 38 - protein, 10 aa, synthetic construct
  REGION 1..10: note = Description of Artificial Sequence: Synthetic peptide
TNIFSLSPMG

SEQ ID NO: 39 - protein, 10 aa, synthetic construct
  REGION 1..10: note = Description of Artificial Sequence: Synthetic peptide
TNIPSISPMG

SEQ ID NO: 40 - protein, 10 aa, synthetic construct
  REGION 1..10: note = Description of Artificial Sequence: Synthetic peptide
TNIFSQSPMG

SEQ ID NO: 41 - protein, 10 aa, synthetic construct
  REGION 1..10: note = Description of Artificial Sequence: Synthetic peptide
TNIESISPMG

SEQ ID NO: 42 - protein, 10 aa, synthetic construct
  REGION 1..10: note = Description of Artificial Sequence: Synthetic peptide
TNIFSHSPMG

SEQ ID NO: 43 - protein, 10 aa, synthetic construct
  REGION 1..10: note = Description of Artificial Sequence: Synthetic peptide
TNIFSESPMG

SEQ ID NO: 44 - protein, 10 aa, synthetic construct
  REGION 1..10: note = Description of Artificial Sequence: Synthetic peptide
TNIDSISPMG

SEQ ID NO: 45 - protein, 10 aa, synthetic construct
  REGION 1..10: note = Description of Artificial Sequence: Synthetic peptide
TNIFSSSPMG

SEQ ID NO: 46 - protein, 10 aa, synthetic construct
  REGION 1..10: note = Description of Artificial Sequence: Synthetic peptide
TNIFSTSPMG

SEQ ID NO: 47 - protein, 10 aa, synthetic construct
  REGION 1..10: note = Description of Artificial Sequence: Synthetic peptide
TNITSVSPMG

SEQ ID NO: 48 - protein, 10 aa, synthetic construct
  REGION 1..10: note = Description of Artificial Sequence: Synthetic peptide
TNISSISPMG

SEQ ID NO: 49 - protein, 10 aa, synthetic construct
  REGION 1..10: note = Description of Artificial Sequence: Synthetic peptide
SNIFSISPMG

SEQ ID NO: 50 - protein, 10 aa, synthetic construct
  REGION 1..10: note = Description of Artificial Sequence: Synthetic peptide
TNIFRISPMG

SEQ ID NO: 51 - protein, 10 aa, synthetic construct
  REGION 1..10: note = Description of Artificial Sequence: Synthetic peptide
TNIVSISPMG

SEQ ID NO: 52 - protein, 10 aa, synthetic construct
  REGION 1..10: note = Description of Artificial Sequence: Synthetic peptide
TNIDSISPMG

SEQ ID NO: 53 - protein, 10 aa, synthetic construct
  REGION 1..10: note = Description of Artificial Sequence: Synthetic peptide
TNIFSRSPMG

SEQ ID NO: 54 - protein, 10 aa, synthetic construct
  REGION 1..10: note = Description of Artificial Sequence: Synthetic peptide
TNIQSISPMG

SEQ ID NO: 55 - protein, 10 aa, synthetic construct
  REGION 1..10: note = Description of Artificial Sequence: Synthetic peptide
TNIFNISPMG

SEQ ID NO: 56 - protein, 10 aa, synthetic construct
  REGION 1..10: note = Description of Artificial Sequence: Synthetic peptide
TNEFSISPMG

SEQ ID NO: 57 - protein, 10 aa, synthetic construct
  REGION 1..10: note = Description of Artificial Sequence: Synthetic peptide
TNIPSISPMG

SEQ ID NO: 58 - protein, 10 aa, synthetic construct
  REGION 1..10: note = Description of Artificial Sequence: Synthetic peptide
TNIGSISPMG

SEQ ID NO: 59 - protein, 10 aa, synthetic construct
  REGION 1..10: note = Description of Artificial Sequence: Synthetic peptide
TNIFSKSPMG

SEQ ID NO: 60 - protein, 10 aa, synthetic construct
  REGION 1..10: note = Description of Artificial Sequence: Synthetic peptide
TNIFSITPMG

SEQ ID NO: 61 - protein, 10 aa, synthetic construct
  REGION 1..10: note = Description of Artificial Sequence: Synthetic peptide
TSDFSISPMG

SEQ ID NO: 62 - protein, 10 aa, synthetic construct
  REGION 1..10: note = Description of Artificial Sequence: Synthetic peptide
TNIMSISPMG

SEQ ID NO: 63 - protein, 10 aa, synthetic construct
  REGION 1..10: note = Description of Artificial Sequence: Synthetic peptide
TNIMSISPMG

SEQ ID NO: 64 - protein, 10 aa, synthetic construct
  REGION 1..10: note = Description of Artificial Sequence: Synthetic peptide
TNIPSISPMG

SEQ ID NO: 65 - protein, 10 aa, synthetic construct
  REGION 1..10: note = Description of Artificial Sequence: Synthetic peptide
TNIFSTSPMG

SEQ ID NO: 66 - protein, 10 aa, synthetic construct
  REGION 1..10: note = Description of Artificial Sequence: Synthetic peptide
TNIFSQSPMG

SEQ ID NO: 67 - protein, 10 aa, synthetic construct
  REGION 1..10: note = Description of Artificial Sequence: Synthetic peptide
TNIASISPMG

SEQ ID NO: 68 - protein, 10 aa, synthetic construct
  REGION 1..10: note = Description of Artificial Sequence: Synthetic peptide
TNIFSKSPMG

SEQ ID NO: 69 - protein, 10 aa, synthetic construct
  REGION 1..10: note = Description of Artificial Sequence: Synthetic peptide
TNIFSRSPMG

SEQ ID NO: 70 - protein, 10 aa, synthetic construct
  REGION 1..10: note = Description of Artificial Sequence: Synthetic peptide
TNHFSISPMG

SEQ ID NO: 71 - protein, 10 aa, synthetic construct
  REGION 1..10: note = Description of Artificial Sequence: Synthetic peptide
TNIFSNSPMG

SEQ ID NO: 72 - protein, 10 aa, synthetic construct
  REGION 1..10: note = Description of Artificial Sequence: Synthetic peptide
TNIFSTSPMG

SEQ ID NO: 73 - protein, 10 aa, synthetic construct
  REGION 1..10: note = Description of Artificial Sequence: Synthetic peptide
TNIFSISPYG

SEQ ID NO: 74 - protein, 10 aa, synthetic construct
  REGION 1..10: note = Description of Artificial Sequence: Synthetic peptide
TNIFSNSPMG

SEQ ID NO: 75 - protein, 10 aa, synthetic construct
  REGION 1..10: note = Description of Artificial Sequence: Synthetic peptide
TNIFSSSPMG

SEQ ID NO: 76 - protein, 10 aa, synthetic construct
  REGION 1..10: note = Description of Artificial Sequence: Synthetic peptide
TNIVSISPMG

SEQ ID NO: 77 - protein, 10 aa, synthetic construct
  REGION 1..10: note = Description of Artificial Sequence: Synthetic peptide
TNISSISPMG

SEQ ID NO: 78 - protein, 10 aa, synthetic construct
  REGION 1..10: note = Description of Artificial Sequence: Synthetic peptide
TNIISISPMG

SEQ ID NO: 79 - protein, 10 aa, synthetic construct
  REGION 1..10: note = Description of Artificial Sequence: Synthetic peptide
TNIASISPMG

SEQ ID NO: 80 - protein, 10 aa, synthetic construct
  REGION 1..10: note = Description of Artificial Sequence: Synthetic peptide
TNIFSESPMG

SEQ ID NO: 81 - protein, 10 aa, synthetic construct
  REGION 1..10: note = Description of Artificial Sequence: Synthetic peptide
TNIFSTSPMG

SEQ ID NO: 82 - protein, 10 aa, synthetic construct
  REGION 1..10: note = Description of Artificial Sequence: Synthetic peptide
TNISSISPMG

SEQ ID NO: 83 - protein, 10 aa, synthetic construct
  REGION 1..10: note = Description of Artificial Sequence: Synthetic peptide
TNVVSISPMG

SEQ ID NO: 84 - protein, 10 aa, synthetic construct
  REGION 1..10: note = Description of Artificial Sequence: Synthetic peptide
TNEFSISPMG

SEQ ID NO: 85 - protein, 10 aa, synthetic construct
  REGION 1..10: note = Description of Artificial Sequence: Synthetic peptide
TNIFSNSPMG

SEQ ID NO: 86 - protein, 10 aa, synthetic construct
  REGION 1..10: note = Description of Artificial Sequence: Synthetic peptide
TNIFSRSPMG

SEQ ID NO: 87 - protein, 10 aa, synthetic construct
  REGION 1..10: note = Description of Artificial Sequence: Synthetic peptide
TNIFSDSPMG

SEQ ID NO: 88 - protein, 10 aa, synthetic construct
  REGION 1..10: note = Description of Artificial Sequence: Synthetic peptide
TNDFSISPMG

SEQ ID NO: 89 - protein, 10 aa, synthetic construct
  REGION 1..10: note = Description of Artificial Sequence: Synthetic peptide
TNIFSKSPMG

SEQ ID NO: 90 - protein, 10 aa, synthetic construct
  REGION 1..10: note = Description of Artificial Sequence: Synthetic peptide
TNIFSIYPMG

SEQ ID NO: 91 - protein, 10 aa, synthetic construct
  REGION 1..10: note = Description of Artificial Sequence: Synthetic peptide
TNIFSSSPMG

SEQ ID NO: 92 - protein, 10 aa, synthetic construct
  REGION 1..10: note = Description of Artificial Sequence: Synthetic peptide
TNIFSVSPMG

SEQ ID NO: 93 - protein, 10 aa, synthetic construct
  REGION 1..10: note = Description of Artificial Sequence: Synthetic peptide
TNIFSITPMG

SEQ ID NO: 94 - protein, 10 aa, synthetic construct
  REGION 1..10: note = Description of Artificial Sequence: Synthetic peptide
TNIESISPMG

SEQ ID NO: 95 - protein, 10 aa, synthetic construct
  REGION 1..10: note = Description of Artificial Sequence: Synthetic peptide
TNIFSTSPMG

SEQ ID NO: 96 - protein, 10 aa, synthetic construct
  REGION 1..10: note = Description of Artificial Sequence: Synthetic peptide
TNIESISPMG

SEQ ID NO: 97 - protein, 10 aa, synthetic construct
  REGION 1..10: note = Description of Artificial Sequence: Synthetic peptide
TNIFSINPMG

SEQ ID NO: 98 - protein, 10 aa, synthetic construct
  REGION 1..10: note = Description of Artificial Sequence: Synthetic peptide
TNIFSITPMG

SEQ ID NO: 99 - protein, 10 aa, synthetic construct
  REGION 1..10: note = Description of Artificial Sequence: Synthetic peptide
TNITSISPMG

SEQ ID NO: 100 - protein, 10 aa, synthetic construct
  REGION 1..10: note = Description of Artificial Sequence: Synthetic peptide
TNIFSGSPMG

SEQ ID NO: 101 - protein, 10 aa, synthetic construct
  REGION 1..10: note = Description of Artificial Sequence: Synthetic peptide
TNIFSITPMG

SEQ ID NO: 102 - protein, 10 aa, synthetic construct
  REGION 1..10: note = Description of Artificial Sequence: Synthetic peptide
TNIDSISPMG

SEQ ID NO: 103 - protein, 10 aa, synthetic construct
  REGION 1..10: note = Description of Artificial Sequence: Synthetic peptide
TNIFSDSPMG

SEQ ID NO: 104 - protein, 10 aa, synthetic construct
  REGION 1..10: note = Description of Artificial Sequence: Synthetic peptide
TNIDSISPMG

SEQ ID NO: 105 - protein, 10 aa, synthetic construct
  REGION 1..10: note = Description of Artificial Sequence: Synthetic peptide
TNIFSKSPMG

SEQ ID NO: 106 - protein, 10 aa, synthetic construct
  REGION 1..10: note = Description of Artificial Sequence: Synthetic peptide
TNIFSVSPMG

SEQ ID NO: 107 - protein, 10 aa, synthetic construct
  REGION 1..10: note = Description of Artificial Sequence: Synthetic peptide
TNQFSISPMG

SEQ ID NO: 108 - protein, 10 aa, synthetic construct
  REGION 1..10: note = Description of Artificial Sequence: Synthetic peptide
TNIRSISPMG

SEQ ID NO: 109 - protein, 10 aa, synthetic construct
  REGION 1..10: note = Description of Artificial Sequence: Synthetic peptide
TNIFSRSPMG

SEQ ID NO: 110 - protein, 10 aa, synthetic construct
  REGION 1..10: note = Description of Artificial Sequence: Synthetic peptide
TNITSISPMG

SEQ ID NO: 111 - protein, 10 aa, synthetic construct
  REGION 1..10: note = Description of Artificial Sequence: Synthetic peptide
TNIFSTSPYG

SEQ ID NO: 112 - protein, 10 aa, synthetic construct
  REGION 1..10: note = Description of Artificial Sequence: Synthetic peptide
TNIFSTSPGG

SEQ ID NO: 113 - protein, 10 aa, synthetic construct
  REGION 1..10: note = Description of Artificial Sequence: Synthetic peptide
TNIFSITPYG

SEQ ID NO: 114 - protein, 10 aa, synthetic construct
  REGION 1..10: note = Description of Artificial Sequence: Synthetic peptide
TNIFSITPGG

SEQ ID NO: 115 - protein, 10 aa, synthetic construct
  REGION 1..10: note = Description of Artificial Sequence: Synthetic peptide
TNIFSISPMG

SEQ ID NO: 116 - protein, 14 aa, synthetic construct
  REGION 1..14: note = Description of Artificial Sequence: Synthetic peptide
AIHGGSTLYADSVK

SEQ ID NO: 117 - protein, 14 aa, synthetic construct
  REGION 1..14: note = Description of Artificial Sequence: Synthetic peptide
AINGFSTLYADSVK

SEQ ID NO: 118 - protein, 14 aa, synthetic construct
  REGION 1..14: note = Description of Artificial Sequence: Synthetic peptide
AIHGSSTLYADSVK

SEQ ID NO: 119 - protein, 14 aa, synthetic construct
  REGION 1..14: note = Description of Artificial Sequence: Synthetic peptide
AIHGDSTLYADSVK

SEQ ID NO: 120 - protein, 14 aa, synthetic construct
  REGION 1..14: note = Description of Artificial Sequence: Synthetic peptide
AIHGFSTLYADSVK

SEQ ID NO: 121 - protein, 14 aa, synthetic construct
  REGION 1..14: note = Description of Artificial Sequence: Synthetic peptide
AIHGFSTVYADSVK

SEQ ID NO: 122 - protein, 14 aa, synthetic construct
  REGION 1..14: note = Description of Artificial Sequence: Synthetic peptide
AIHGTSTLYADSVK

SEQ ID NO: 123 - protein, 14 aa, synthetic construct
  REGION 1..14: note = Description of Artificial Sequence: Synthetic peptide
AIHGESTLYADSVK

SEQ ID NO: 124 - protein, 14 aa, synthetic construct
  REGION 1..14: note = Description of Artificial Sequence: Synthetic peptide
AIHGRSTLYADSVK

SEQ ID NO: 125 - protein, 14 aa, synthetic construct
  REGION 1..14: note = Description of Artificial Sequence: Synthetic peptide
AIHGESTLYADSVK

SEQ ID NO: 126 - protein, 14 aa, synthetic construct
  REGION 1..14: note = Description of Artificial Sequence: Synthetic peptide
AISGFSTLYADSVK

SEQ ID NO: 127 - protein, 14 aa, synthetic construct
  REGION 1..14: note = Description of Artificial Sequence: Synthetic peptide
AIHGKSTLYADSVK

SEQ ID NO: 128 - protein, 14 aa, synthetic construct
  REGION 1..14: note = Description of Artificial Sequence: Synthetic peptide
AIHGKSTLYADSVK

SEQ ID NO: 129 - protein, 14 aa, synthetic construct
  REGION 1..14: note = Description of Artificial Sequence: Synthetic peptide
AIHGFETLYADSVK

SEQ ID NO: 130 - protein, 14 aa, synthetic construct
  REGION 1..14: note = Description of Artificial Sequence: Synthetic peptide
AIHGDSTLYADSVK

SEQ ID NO: 131 - protein, 14 aa, synthetic construct
  REGION 1..14: note = Description of Artificial Sequence: Synthetic peptide
AIHGNSTLYADSVK

SEQ ID NO: 132 - protein, 14 aa, synthetic construct
  REGION 1..14: note = Description of Artificial Sequence: Synthetic peptide
AIHGSSTLYADSVK

SEQ ID NO: 133 - protein, 14 aa, synthetic construct
  REGION 1..14: note = Description of Artificial Sequence: Synthetic peptide
AIHGSSTLYADSVK

SEQ ID NO: 134 - protein, 14 aa, synthetic construct
  REGION 1..14: note = Description of Artificial Sequence: Synthetic peptide
AIHGFQTLYADSVK

SEQ ID NO: 135 - protein, 14 aa, synthetic construct
  REGION 1..14: note = Description of Artificial Sequence: Synthetic peptide
AIHGHSTLYADSVK

SEQ ID NO: 136 - protein, 14 aa, synthetic construct
  REGION 1..14: note = Description of Artificial Sequence: Synthetic peptide
AIHGNSTLYADSVK

SEQ ID NO: 137 - protein, 14 aa, synthetic construct
  REGION 1..14: note = Description of Artificial Sequence: Synthetic peptide
AIHGDSTLYADSVK

SEQ ID NO: 138 - protein, 14 aa, synthetic construct
  REGION 1..14: note = Description of Artificial Sequence: Synthetic peptide
AIHGFKTLYADSVK

SEQ ID NO: 139 - protein, 14 aa, synthetic construct
  REGION 1..14: note = Description of Artificial Sequence: Synthetic peptide
AIHGDSTLYADSVK

SEQ ID NO: 140 - protein, 14 aa, synthetic construct
  REGION 1..14: note = Description of Artificial Sequence: Synthetic peptide
AIHGFSTYYADSVK

SEQ ID NO: 141 - protein, 14 aa, synthetic construct
  REGION 1..14: note = Description of Artificial Sequence: Synthetic peptide
AIHGGSTLYADSVK

SEQ ID NO: 142 - protein, 14 aa, synthetic construct
  REGION 1..14: note = Description of Artificial Sequence: Synthetic peptide
AIHGFSTLYADSVK

SEQ ID NO: 143 - protein, 14 aa, synthetic construct
  REGION 1..14: note = Description of Artificial Sequence: Synthetic peptide
AIHGKSTLYADSVK

SEQ ID NO: 144 - protein, 14 aa, synthetic construct
  REGION 1..14: note = Description of Artificial Sequence: Synthetic peptide
AIHGDSTLYADSVK

SEQ ID NO: 145 - protein, 14 aa, synthetic construct
  REGION 1..14: note = Description of Artificial Sequence: Synthetic peptide
AIHGVSTLYADSVK

SEQ ID NO: 146 - protein, 14 aa, synthetic construct
  REGION 1..14: note = Description of Artificial Sequence: Synthetic peptide
AIHGTSTLYADSVK

SEQ ID NO: 147 - protein, 14 aa, synthetic construct
  REGION 1..14: note = Description of Artificial Sequence: Synthetic peptide
AIHGDSTLYADSVK

SEQ ID NO: 148 - protein, 14 aa, synthetic construct
  REGION 1..14: note = Description of Artificial Sequence: Synthetic peptide
AIHGSSTLYADSVK

SEQ ID NO: 149 - protein, 14 aa, synthetic construct
  REGION 1..14: note = Description of Artificial Sequence: Synthetic peptide
AIHGSSTLYADSVK

SEQ ID NO: 150 - protein, 14 aa, synthetic construct
  REGION 1..14: note = Description of Artificial Sequence: Synthetic peptide
AIHGDSTLYADSVK

SEQ ID NO: 151 - protein, 14 aa, synthetic construct
  REGION 1..14: note = Description of Artificial Sequence: Synthetic peptide
AIHGTSTLYADSVK

SEQ ID NO: 152 - protein, 14 aa, synthetic construct
  REGION 1..14: note = Description of Artificial Sequence: Synthetic peptide
AIHGTSTLYADSVK

SEQ ID NO: 153 - protein, 14 aa, synthetic construct
  REGION 1..14: note = Description of Artificial Sequence: Synthetic peptide
AIHGDSTLYADSVK

SEQ ID NO: 154 - protein, 14 aa, synthetic construct
  REGION 1..14: note = Description of Artificial Sequence: Synthetic peptide
AIHGQSTLYADSVK

SEQ ID NO: 155 - protein, 14 aa, synthetic construct
  REGION 1..14: note = Description of Artificial Sequence: Synthetic peptide
AIHGDSTLYADSVK

SEQ ID NO: 156 - protein, 14 aa, synthetic construct
  REGION 1..14: note = Description of Artificial Sequence: Synthetic peptide
AIHGKSTLYADSVK

SEQ ID NO: 157 - protein, 14 aa, synthetic construct
  REGION 1..14: note = Description of Artificial Sequence: Synthetic peptide
AIHGTSTLYADSVK

SEQ ID NO: 158 - protein, 14 aa, synthetic construct
  REGION 1..14: note = Description of Artificial Sequence: Synthetic peptide
AIHGNSTLYADSVK

SEQ ID NO: 159 - protein, 14 aa, synthetic construct
  REGION 1..14: note = Description of Artificial Sequence: Synthetic peptide
AIHGFQTLYADSVK

SEQ ID NO: 160 - protein, 14 aa, synthetic construct
  REGION 1..14: note = Description of Artificial Sequence: Synthetic peptide
AIHGFSTWYADSVK

SEQ ID NO: 161 - protein, 14 aa, synthetic construct
  REGION 1..14: note = Description of Artificial Sequence: Synthetic peptide
AIHGFSTIYADSVK

SEQ ID NO: 162 - protein, 14 aa, synthetic construct
  REGION 1..14: note = Description of Artificial Sequence: Synthetic peptide
AIHGPSTLYADSVK

SEQ ID NO: 163 - protein, 14 aa, synthetic construct
  REGION 1..14: note = Description of Artificial Sequence: Synthetic peptide
AIHGHSTLYADSVK

SEQ ID NO: 164 - protein, 14 aa, synthetic construct
  REGION 1..14: note = Description of Artificial Sequence: Synthetic peptide
AIHGESTLYADSVK

SEQ ID NO: 165 - protein, 14 aa, synthetic construct
  REGION 1..14: note = Description of Artificial Sequence: Synthetic peptide
AIHGDSTLYADSVK

SEQ ID NO: 166 - protein, 14 aa, synthetic construct
  REGION 1..14: note = Description of Artificial Sequence: Synthetic peptide
AIHGDSTLYADSVK

SEQ ID NO: 167 - protein, 14 aa, synthetic construct
  REGION 1..14: note = Description of Artificial Sequence: Synthetic peptide
AIHGNSTLYADSVK

SEQ ID NO: 168 - protein, 14 aa, synthetic construct
  REGION 1..14: note = Description of Artificial Sequence: Synthetic peptide
AIHGFETLYADSVK

SEQ ID NO: 169 - protein, 14 aa, synthetic construct
  REGION 1..14: note = Description of Artificial Sequence: Synthetic peptide
AIHGFETLYADSVK

SEQ ID NO: 170 - protein, 14 aa, synthetic construct
  REGION 1..14: note = Description of Artificial Sequence: Synthetic peptide
AIHGFSTYYADSVK

SEQ ID NO: 171 - protein, 14 aa, synthetic construct
  REGION 1..14: note = Description of Artificial Sequence: Synthetic peptide
AIHGLSTLYADSVK

SEQ ID NO: 172 - protein, 14 aa, synthetic construct
  REGION 1..14: note = Description of Artificial Sequence: Synthetic peptide
AIHGASTLYADSVK

SEQ ID NO: 173 - protein, 14 aa, synthetic construct
  REGION 1..14: note = Description of Artificial Sequence: Synthetic peptide
AIHGQSTLYADSVK

SEQ ID NO: 174 - protein, 14 aa, synthetic construct
  REGION 1..14: note = Description of Artificial Sequence: Synthetic peptide
AIHGQSTLYADSVK

SEQ ID NO: 175 - protein, 14 aa, synthetic construct
  REGION 1..14: note = Description of Artificial Sequence: Synthetic peptide
AIHGTSTLYADSVK

SEQ ID NO: 176 - protein, 14 aa, synthetic construct
  REGION 1..14: note = Description of Artificial Sequence: Synthetic peptide
AIHGFETLYADSVK

SEQ ID NO: 177 - protein, 14 aa, synthetic construct
  REGION 1..14: note = Description of Artificial Sequence: Synthetic peptide
AIHGFSTVYADSVK

SEQ ID NO: 178 - protein, 14 aa, synthetic construct
  REGION 1..14: note = Description of Artificial Sequence: Synthetic peptide
AIHGNSTLYADSVK

SEQ ID NO: 179 - protein, 14 aa, synthetic construct
  REGION 1..14: note = Description of Artificial Sequence: Synthetic peptide
AIHGESTLYADSVK

SEQ ID NO: 180 - protein, 14 aa, synthetic construct
  REGION 1..14: note = Description of Artificial Sequence: Synthetic peptide
AIHGFSTLYADSVK

SEQ ID NO: 181 - protein, 14 aa, synthetic construct
  REGION 1..14: note = Description of Artificial Sequence: Synthetic peptide
AIHGKSTLYADSVK

SEQ ID NO: 182 - protein, 14 aa, synthetic construct
  REGION 1..14: note = Description of Artificial Sequence: Synthetic peptide
AIHGKSTLYADSVK

SEQ ID NO: 183 - protein, 14 aa, synthetic construct
  REGION 1..14: note = Description of Artificial Sequence: Synthetic peptide
AIHGNSTLYADSVK

SEQ ID NO: 184 - protein, 14 aa, synthetic construct
  REGION 1..14: note = Description of Artificial Sequence: Synthetic peptide
AIHGESTLYADSVK

SEQ ID NO: 185 - protein, 14 aa, synthetic construct
  REGION 1..14: note = Description of Artificial Sequence: Synthetic peptide
AIHGSSTLYADSVK

SEQ ID NO: 186 - protein, 14 aa, synthetic construct
  REGION 1..14: note = Description of Artificial Sequence: Synthetic peptide
AIHGRSTLYADSVK

SEQ ID NO: 187 - protein, 14 aa, synthetic construct
  REGION 1..14: note = Description of Artificial Sequence: Synthetic peptide
AIHGFSTIYADSVK

SEQ ID NO: 188 - protein, 14 aa, synthetic construct
  REGION 1..14: note = Description of Artificial Sequence: Synthetic peptide
AIHGTSTLYADSVK

SEQ ID NO: 189 - protein, 14 aa, synthetic construct
  REGION 1..14: note = Description of Artificial Sequence: Synthetic peptide
AIHGFSTLYADSVK

SEQ ID NO: 190 - protein, 14 aa, synthetic construct
  REGION 1..14: note = Description of Artificial Sequence: Synthetic peptide
AIHGHSTLYADSVK

SEQ ID NO: 191 - protein, 14 aa, synthetic construct
  REGION 1..14: note = Description of Artificial Sequence: Synthetic peptide
AIHGDSTLYADSVK

SEQ ID NO: 192 - protein, 14 aa, synthetic construct
  REGION 1..14: note = Description of Artificial Sequence: Synthetic peptide
AIHGFDTLYADSVK

SEQ ID NO: 193 - protein, 14 aa, synthetic construct
  REGION 1..14: note = Description of Artificial Sequence: Synthetic peptide
AIHGASTLYADSVK

SEQ ID NO: 194 - protein, 14 aa, synthetic construct
  REGION 1..14: note = Description of Artificial Sequence: Synthetic peptide
AIHGSSTLYADSVK

SEQ ID NO: 195 - protein, 14 aa, synthetic construct
  REGION 1..14: note = Description of Artificial Sequence: Synthetic peptide
AIHGFTTLYADSVK

SEQ ID NO: 196 - protein, 14 aa, synthetic construct
  REGION 1..14: note = Description of Artificial Sequence: Synthetic peptide
AIHGTSTLYADSVK

SEQ ID NO: 197 - protein, 14 aa, synthetic construct
  REGION 1..14: note = Description of Artificial Sequence: Synthetic peptide
AIHGFSTVYADSVK

SEQ ID NO: 198 - protein, 14 aa, synthetic construct
  REGION 1..14: note = Description of Artificial Sequence: Synthetic peptide
AIHGKSTLYADSVK

SEQ ID NO: 199 - protein, 14 aa, synthetic construct
  REGION 1..14: note = Description of Artificial Sequence: Synthetic peptide
AIHGESTLYADSVK

SEQ ID NO: 200 - protein, 14 aa, synthetic construct
  REGION 1..14: note = Description of Artificial Sequence: Synthetic peptide
AIHGPSTLYADSVK

SEQ ID NO: 201 - protein, 14 aa, synthetic construct
  REGION 1..14: note = Description of Artificial Sequence: Synthetic peptide
AIHGISTLYADSVK

SEQ ID NO: 202 - protein, 14 aa, synthetic construct
  REGION 1..14: note = Description of Artificial Sequence: Synthetic peptide
AIHGFSTFYADSVK

SEQ ID NO: 203 - protein, 14 aa, synthetic construct
  REGION 1..14: note = Description of Artificial Sequence: Synthetic peptide
AIHGGSTLYADSVK

SEQ ID NO: 204 - protein, 14 aa, synthetic construct
  REGION 1..14: note = Description of Artificial Sequence: Synthetic peptide
AIHGSSTLYADSVK

SEQ ID NO: 205 - protein, 14 aa, synthetic construct
  REGION 1..14: note = Description of Artificial Sequence: Synthetic peptide
AIHGSSTLYADSVK

SEQ ID NO: 206 - protein, 14 aa, synthetic construct
  REGION 1..14: note = Description of Artificial Sequence: Synthetic peptide
AIHGFSTLYADSVK

SEQ ID NO: 207 - protein, 14 aa, synthetic construct
  REGION 1..14: note = Description of Artificial Sequence: Synthetic peptide
AIHGNSTLYADSVK

SEQ ID NO: 208 - protein, 14 aa, synthetic construct
  REGION 1..14: note = Description of Artificial Sequence: Synthetic peptide
AIHGESTLYADSVK

SEQ ID NO: 209 - protein, 14 aa, synthetic construct
  REGION 1..14: note = Description of Artificial Sequence: Synthetic peptide
AIHGFSTLYADSVK

SEQ ID NO: 210 - protein, 14 aa, synthetic construct
  REGION 1..14: note = Description of Artificial Sequence: Synthetic peptide
AIHGTSTLYADSVK

SEQ ID NO: 211 - protein, 14 aa, synthetic construct
  REGION 1..14: note = Description of Artificial Sequence: Synthetic peptide
AIHGTSTLYADSVK

SEQ ID NO: 212 - protein, 14 aa, synthetic construct
  REGION 1..14: note = Description of Artificial Sequence: Synthetic peptide
AIHGFDTLYADSVK

SEQ ID NO: 213 - protein, 14 aa, synthetic construct
  REGION 1..14: note = Description of Artificial Sequence: Synthetic peptide
AIHGASTLYADSVK

SEQ ID NO: 214 - protein, 14 aa, synthetic construct
  REGION 1..14: note = Description of Artificial Sequence: Synthetic peptide
AIHGNSTLYADSVK

SEQ ID NO: 215 - protein, 14 aa, synthetic construct
  REGION 1..14: note = Description of Artificial Sequence: Synthetic peptide
AIHGNSTLYADSVK

SEQ ID NO: 216 - protein, 14 aa, synthetic construct
  REGION 1..14: note = Description of Artificial Sequence: Synthetic peptide
AIHGESTLYADSVK

SEQ ID NO: 217 - protein, 14 aa, synthetic construct
  REGION 1..14: note = Description of Artificial Sequence: Synthetic peptide
AIHGESTLYADSVK

SEQ ID NO: 218 - protein, 14 aa, synthetic construct
  REGION 1..14: note = Description of Artificial Sequence: Synthetic peptide
AIHGFSTLYADSVK

SEQ ID NO: 219 - protein, 14 aa, synthetic construct
  REGION 1..14: note = Description of Artificial Sequence: Synthetic peptide
AIHGSSTLYADSVK

SEQ ID NO: 220 - protein, 14 aa, synthetic construct
  REGION 1..14: note = Description of Artificial Sequence: Synthetic peptide
AIHGSSTLYADSVK

SEQ ID NO: 221 - protein, 14 aa, synthetic construct
  REGION 1..14: note = Description of Artificial Sequence: Synthetic peptide
AIHGNSTLYADSVK

SEQ ID NO: 222 - protein, 14 aa, synthetic construct
  REGION 1..14: note = Description of Artificial Sequence: Synthetic peptide
AIHGKSTLYADSVK

SEQ ID NO: 223 - protein, 14 aa, synthetic construct
  REGION 1..14: note = Description of Artificial Sequence: Synthetic peptide
AIHGSSTLYADSVK

SEQ ID NO: 224 - protein, 14 aa, synthetic construct
  REGION 1..14: note = Description of Artificial Sequence: Synthetic peptide
AIHGSSTLYADSVK

SEQ ID NO: 225 - protein, 14 aa, synthetic construct
  REGION 1..14: note = Description of Artificial Sequence: Synthetic peptide
AIHGESTLYADSVK

SEQ ID NO: 226 - protein, 14 aa, synthetic construct
  REGION 1..14: note = Description of Artificial Sequence: Synthetic peptide
AIHGFSTIYADSVK

SEQ ID NO: 227 - protein, 14 aa, synthetic construct
  REGION 1..14: note = Description of Artificial Sequence: Synthetic peptide
AIHGFSTIYADSVK

SEQ ID NO: 228 - protein, 14 aa, synthetic construct
  REGION 1..14: note = Description of Artificial Sequence: Synthetic peptide
AIHGASTLYADSVK

SEQ ID NO: 229 - protein, 14 aa, synthetic construct
  REGION 1..14: note = Description of Artificial Sequence: Synthetic peptide
AIHGASTLYADSVK

SEQ ID NO: 230 - protein, 14 aa, synthetic construct
  REGION 1..14: note = Description of Artificial Sequence: Synthetic peptide
AIHGFSTLYADSVK

SEQ ID NO: 231 - protein, 12 aa, synthetic construct
  REGION 1..12: note = Description of Artificial Sequence: Synthetic peptide
VPWGDYHPRNVA

SEQ ID NO: 232 - protein, 12 aa, synthetic construct
  REGION 1..12: note = Description of Artificial Sequence: Synthetic peptide
VPWGDYHPRNVH

SEQ ID NO: 233 - protein, 12 aa, synthetic construct
  REGION 1..12: note = Description of Artificial Sequence: Synthetic peptide
VPWGDYHPRNVY

SEQ ID NO: 234 - protein, 12 aa, synthetic construct
  REGION 1..12: note = Description of Artificial Sequence: Synthetic peptide
VPWGRYHPRNVY

SEQ ID NO: 235 - protein, 12 aa, synthetic construct
  REGION 1..12: note = Description of Artificial Sequence: Synthetic peptide
VPWGDYHPRNVY

SEQ ID NO: 236 - protein, 12 aa, synthetic construct
  REGION 1..12: note = Description of Artificial Sequence: Synthetic peptide
VPWGDYHPRNVY

SEQ ID NO: 237 - protein, 12 aa, synthetic construct
  REGION 1..12: note = Description of Artificial Sequence: Synthetic peptide
VPWGDYHPGNVY

SEQ ID NO: 238 - protein, 12 aa, synthetic construct
  REGION 1..12: note = Description of Artificial Sequence: Synthetic peptide
VPWGDYHPRKVY

SEQ ID NO: 239 - protein, 12 aa, synthetic construct
  REGION 1..12: note = Description of Artificial Sequence: Synthetic peptide
VPWGSYHPRNVY

SEQ ID NO: 240 - protein, 12 aa, synthetic construct
  REGION 1..12: note = Description of Artificial Sequence: Synthetic peptide
VPWGDYHPRNVA

SEQ ID NO: 241 - protein, 12 aa, synthetic construct
  REGION 1..12: note = Description of Artificial Sequence: Synthetic peptide
VPWGDYHPRNVY

SEQ ID NO: 242 - protein, 12 aa, synthetic construct
  REGION 1..12: note = Description of Artificial Sequence: Synthetic peptide
VPWGDYHPRNVV

SEQ ID NO: 243 - protein, 12 aa, synthetic construct
  REGION 1..12: note = Description of Artificial Sequence: Synthetic peptide
VPWGDYHPRNVK

SEQ ID NO: 244 - protein, 12 aa, synthetic construct
  REGION 1..12: note = Description of Artificial Sequence: Synthetic peptide
VPWGDYHPGNVY

SEQ ID NO: 245 - protein, 12 aa, synthetic construct
  REGION 1..12: note = Description of Artificial Sequence: Synthetic peptide
VPWGEYHPRNVY

SEQ ID NO: 246 - protein, 12 aa, synthetic construct
  REGION 1..12: note = Description of Artificial Sequence: Synthetic peptide
VPWGIYHPRNVY

SEQ ID NO: 247 - protein, 12 aa, synthetic construct
  REGION 1..12: note = Description of Artificial Sequence: Synthetic peptide
VPWGRYHPRNVY

SEQ ID NO: 248 - protein, 12 aa, synthetic construct
  REGION 1..12: note = Description of Artificial Sequence: Synthetic peptide
VPWGDYHPGNVY

SEQ ID NO: 249 - protein, 12 aa, synthetic construct
  REGION 1..12: note = Description of Artificial Sequence: Synthetic peptide
VPWGDYHPRNVV

SEQ ID NO: 250 - protein, 12 aa, synthetic construct
  REGION 1..12: note = Description of Artificial Sequence: Synthetic peptide
VPWGDYHPGNVY

SEQ ID NO: 251 - protein, 12 aa, synthetic construct
  REGION 1..12: note = Description of Artificial Sequence: Synthetic peptide
VPWGRYHPRNVY

SEQ ID NO: 252 - protein, 12 aa, synthetic construct
  REGION 1..12: note = Description of Artificial Sequence: Synthetic peptide
VPWGDYHPRNVY

SEQ ID NO: 253 - protein, 12 aa, synthetic construct
  REGION 1..12: note = Description of Artificial Sequence: Synthetic peptide
VPWGDYHPGNVY

SEQ ID NO: 254 - protein, 12 aa, synthetic construct
  REGION 1..12: note = Description of Artificial Sequence: Synthetic peptide
VPWGKYHPRNVY

SEQ ID NO: 255 - protein, 12 aa, synthetic construct
  REGION 1..12: note = Description of Artificial Sequence: Synthetic peptide
VPWGSYHPRNVY

SEQ ID NO: 256 - protein, 12 aa, synthetic construct
  REGION 1..12: note = Description of Artificial Sequence: Synthetic peptide
VPWGDYHPRNVH

SEQ ID NO: 257 - protein, 12 aa, synthetic construct
  REGION 1..12: note = Description of Artificial Sequence: Synthetic peptide
VPWGYYHPRNVY

SEQ ID NO: 258 - protein, 12 aa, synthetic construct
  REGION 1..12: note = Description of Artificial Sequence: Synthetic peptide
VPWGDYHPGNVY

SEQ ID NO: 259 - protein, 12 aa, synthetic construct
  REGION 1..12: note = Description of Artificial Sequence: Synthetic peptide
VPWGDYHPRNVR

SEQ ID NO: 260 - protein, 12 aa, synthetic construct
  REGION 1..12: note = Description of Artificial Sequence: Synthetic peptide
VPWGDYHPRNVQ

SEQ ID NO: 261 - protein, 12 aa, synthetic construct
  REGION 1..12: note = Description of Artificial Sequence: Synthetic peptide
VPWGDYHPRNVY

SEQ ID NO: 262 - protein, 12 aa, synthetic construct
  REGION 1..12: note = Description of Artificial Sequence: Synthetic peptide
VPWGDYHPRNVT

SEQ ID NO: 263 - protein, 12 aa, synthetic construct
  REGION 1..12: note = Description of Artificial Sequence: Synthetic peptide
VPWGDYHPRNVN

SEQ ID NO: 264 - protein, 12 aa, synthetic construct
  REGION 1..12: note = Description of Artificial Sequence: Synthetic peptide
VPWGRYHPRNVY

SEQ ID NO: 265 - protein, 12 aa, synthetic construct
  REGION 1..12: note = Description of Artificial Sequence: Synthetic peptide
VPWGDYHPGNVY

SEQ ID NO: 266 - protein, 12 aa, synthetic construct
  REGION 1..12: note = Description of Artificial Sequence: Synthetic peptide
VPWGDYHPGNVY

SEQ ID NO: 267 - protein, 12 aa, synthetic construct
  REGION 1..12: note = Description of Artificial Sequence: Synthetic peptide
VPWGKYHPRNVY

SEQ ID NO: 268 - protein, 12 aa, synthetic construct
  REGION 1..12: note = Description of Artificial Sequence: Synthetic peptide
VPWGDYHPRNVY

SEQ ID NO: 269 - protein, 12 aa, synthetic construct
  REGION 1..12: note = Description of Artificial Sequence: Synthetic peptide
VPWGDYHPRNVQ

SEQ ID NO: 270 - protein, 12 aa, synthetic construct
  REGION 1..12: note = Description of Artificial Sequence: Synthetic peptide
VPWGDYHPGNVC

SEQ ID NO: 271 - protein, 12 aa, synthetic construct
  REGION 1..12: note = Description of Artificial Sequence: Synthetic peptide
VPWGDYHPRRVY

SEQ ID NO: 272 - protein, 12 aa, synthetic construct
  REGION 1..12: note = Description of Artificial Sequence: Synthetic peptide
VPWGRYHPRNVY

SEQ ID NO: 273 - protein, 12 aa, synthetic construct
  REGION 1..12: note = Description of Artificial Sequence: Synthetic peptide
VPWGTYHPRNVY

SEQ ID NO: 274 - protein, 12 aa, synthetic construct
  REGION 1..12: note = Description of Artificial Sequence: Synthetic peptide
VPWGDYHPGNVY

SEQ ID NO: 275 - protein, 12 aa, synthetic construct
  REGION 1..12: note = Description of Artificial Sequence: Synthetic peptide
VPWGRYHPRNVY

SEQ ID NO: 276 - protein, 12 aa, synthetic construct
  REGION 1..12: note = Description of Artificial Sequence: Synthetic peptide
VPWGDYHPGNVY

SEQ ID NO: 277 - protein, 12 aa, synthetic construct
  REGION 1..12: note = Description of Artificial Sequence: Synthetic peptide
VPWGDYHPTNVY

SEQ ID NO: 278 - protein, 12 aa, synthetic construct
  REGION 1..12: note = Description of Artificial Sequence: Synthetic peptide
VPWGRYHPRNVY

SEQ ID NO: 279 - protein, 12 aa, synthetic construct
  REGION 1..12: note = Description of Artificial Sequence: Synthetic peptide
VPWGDYHPRNVT

SEQ ID NO: 280 - protein, 12 aa, synthetic construct
  REGION 1..12: note = Description of Artificial Sequence: Synthetic peptide
VPWGRYHPRNVY

SEQ ID NO: 281 - protein, 12 aa, synthetic construct
  REGION 1..12: note = Description of Artificial Sequence: Synthetic peptide
VPWGDYHPRRVY

SEQ ID NO: 282 - protein, 12 aa, synthetic construct
  REGION 1..12: note = Description of Artificial Sequence: Synthetic peptide
VPWGDYHPRMVY

SEQ ID NO: 283 - protein, 12 aa, synthetic construct
  REGION 1..12: note = Description of Artificial Sequence: Synthetic peptide
VPWGDYHPRNVL

SEQ ID NO: 284 - protein, 12 aa, synthetic construct
  REGION 1..12: note = Description of Artificial Sequence: Synthetic peptide
VPWGDYHPGNVY

SEQ ID NO: 285 - protein, 12 aa, synthetic construct
  REGION 1..12: note = Description of Artificial Sequence: Synthetic peptide
VPWGRYHPRNVY

SEQ ID NO: 286 - protein, 12 aa, synthetic construct
  REGION 1..12: note = Description of Artificial Sequence: Synthetic peptide
VPWGAYHPRNVY

SEQ ID NO: 287 - protein, 12 aa, synthetic construct
  REGION 1..12: note = Description of Artificial Sequence: Synthetic peptide
VPWGDYHPRNVA

SEQ ID NO: 288 - protein, 12 aa, synthetic construct
  REGION 1..12: note = Description of Artificial Sequence: Synthetic peptide
VPWGDYHPQNVY

SEQ ID NO: 289 - protein, 12 aa, synthetic construct
  REGION 1..12: note = Description of Artificial Sequence: Synthetic peptide
VPWGDYHPRNVT

SEQ ID NO: 290 - protein, 12 aa, synthetic construct
  REGION 1..12: note = Description of Artificial Sequence: Synthetic peptide
VPWGRYHPRNVY

SEQ ID NO: 291 - protein, 12 aa, synthetic construct
  REGION 1..12: note = Description of Artificial Sequence: Synthetic peptide
VPWGDYHPGNVY

SEQ ID NO: 292 - protein, 12 aa, synthetic construct
  REGION 1..12: note = Description of Artificial Sequence: Synthetic peptide
VPWGDYHPGNVY

SEQ ID NO: 293 - protein, 12 aa, synthetic construct
  REGION 1..12: note = Description of Artificial Sequence: Synthetic peptide
VPWGDYHPGNVY

SEQ ID NO: 294 - protein, 12 aa, synthetic construct
  REGION 1..12: note = Description of Artificial Sequence: Synthetic peptide
VPWGDYHPRNVY

SEQ ID NO: 295 - protein, 12 aa, synthetic construct
  REGION 1..12: note = Description of Artificial Sequence: Synthetic peptide
VPWGDYHPGNVY

SEQ ID NO: 296 - protein, 12 aa, synthetic construct
  REGION 1..12: note = Description of Artificial Sequence: Synthetic peptide
VPWGDYHPSNVY

SEQ ID NO: 297 - protein, 12 aa, synthetic construct
  REGION 1..12: note = Description of Artificial Sequence: Synthetic peptide
VPWGDYHPGNVY

SEQ ID NO: 298 - protein, 12 aa, synthetic construct
  REGION 1..12: note = Description of Artificial Sequence: Synthetic peptide
VPWGDYHPREVY

SEQ ID NO: 299 - protein, 12 aa, synthetic construct
  REGION 1..12: note = Description of Artificial Sequence: Synthetic peptide
VPWGRYHPGNVY

SEQ ID NO: 300 - protein, 12 aa, synthetic construct
  REGION 1..12: note = Description of Artificial Sequence: Synthetic peptide
VPWGDYHPRVVY

SEQ ID NO: 301 - protein, 12 aa, synthetic construct
  REGION 1..12: note = Description of Artificial Sequence: Synthetic peptide
VPWGDYHPRNVM

SEQ ID NO: 302 - protein, 12 aa, synthetic construct
  REGION 1..12: note = Description of Artificial Sequence: Synthetic peptide
VPWGDYHPLNVY

SEQ ID NO: 303 - protein, 12 aa, synthetic construct
  REGION 1..12: note = Description of Artificial Sequence: Synthetic peptide
VPWGDYHPGNVY

SEQ ID NO: 304 - protein, 12 aa, synthetic construct
  REGION 1..12: note = Description of Artificial Sequence: Synthetic peptide
VPWGDYHPGNVY

SEQ ID NO: 305 - protein, 12 aa, synthetic construct
  REGION 1..12: note = Description of Artificial Sequence: Synthetic peptide
VPWGDYHPRNVT

SEQ ID NO: 306 - protein, 12 aa, synthetic construct
  REGION 1..12: note = Description of Artificial Sequence: Synthetic peptide
VPWGDYHPRNVS

SEQ ID NO: 307 - protein, 12 aa, synthetic construct
  REGION 1..12: note = Description of Artificial Sequence: Synthetic peptide
VPWGDYHPRNVY

SEQ ID NO: 308 - protein, 12 aa, synthetic construct
  REGION 1..12: note = Description of Artificial Sequence: Synthetic peptide
VPWGDYHPGNVY

SEQ ID NO: 309 - protein, 12 aa, synthetic construct
  REGION 1..12: note = Description of Artificial Sequence: Synthetic peptide
VPWGDYHPGNVY

SEQ ID NO: 310 - protein, 12 aa, synthetic construct
  REGION 1..12: note = Description of Artificial Sequence: Synthetic peptide
VPWGDYHPRNVT

SEQ ID NO: 311 - protein, 12 aa, synthetic construct
  REGION 1..12: note = Description of Artificial Sequence: Synthetic peptide
VPWGDYHPGNVY

SEQ ID NO: 312 - protein, 12 aa, synthetic construct
  REGION 1..12: note = Description of Artificial Sequence: Synthetic peptide
VPWGRYHPRNVY

SEQ ID NO: 313 - protein, 12 aa, synthetic construct
  REGION 1..12: note = Description of Artificial Sequence: Synthetic peptide
VPWGDYHPNNVY

SEQ ID NO: 314 - protein, 12 aa, synthetic construct
  REGION 1..12: note = Description of Artificial Sequence: Synthetic peptide
VPWGDYHPGNVY

SEQ ID NO: 315 - protein, 12 aa, synthetic construct
  REGION 1..12: note = Description of Artificial Sequence: Synthetic peptide
VPWGDYHPRNVT

SEQ ID NO: 316 - protein, 12 aa, synthetic construct
  REGION 1..12: note = Description of Artificial Sequence: Synthetic peptide
VPWGDYHPGNVY

SEQ ID NO: 317 - protein, 12 aa, synthetic construct
  REGION 1..12: note = Description of Artificial Sequence: Synthetic peptide
VPWGDYHPGNVY

SEQ ID NO: 318 - protein, 12 aa, synthetic construct
  REGION 1..12: note = Description of Artificial Sequence: Synthetic peptide
VPWGDYHPRNVA

SEQ ID NO: 319 - protein, 12 aa, synthetic construct
  REGION 1..12: note = Description of Artificial Sequence: Synthetic peptide
VPWGDYHPGNVY

SEQ ID NO: 320 - protein, 12 aa, synthetic construct
  REGION 1..12: note = Description of Artificial Sequence: Synthetic peptide
VPWGDYHPKNVY

SEQ ID NO: 321 - protein, 12 aa, synthetic construct
  REGION 1..12: note = Description of Artificial Sequence: Synthetic peptide
VPWGDYHPGNVY

SEQ ID NO: 322 - protein, 12 aa, synthetic construct
  REGION 1..12: note = Description of Artificial Sequence: Synthetic peptide
VPWGKYHPRNVY

SEQ ID NO: 323 - protein, 12 aa, synthetic construct
  REGION 1..12: note = Description of Artificial Sequence: Synthetic peptide
VPWGRYHPRNVY

SEQ ID NO: 324 - protein, 12 aa, synthetic construct
  REGION 1..12: note = Description of Artificial Sequence: Synthetic peptide
VPWGDYHPGNVY

SEQ ID NO: 325 - protein, 12 aa, synthetic construct
  REGION 1..12: note = Description of Artificial Sequence: Synthetic peptide
VPWGDYHPRNVQ

SEQ ID NO: 326 - protein, 12 aa, synthetic construct
  REGION 1..12: note = Description of Artificial Sequence: Synthetic peptide
VPWGDYHPGNVY

SEQ ID NO: 327 - protein, 12 aa, synthetic construct
  REGION 1..12: note = Description of Artificial Sequence: Synthetic peptide
VPWGDYHPRNVS

SEQ ID NO: 328 - protein, 12 aa, synthetic construct
  REGION 1..12: note = Description of Artificial Sequence: Synthetic peptide
VPWGDYHPGNVY

SEQ ID NO: 329 - protein, 12 aa, synthetic construct
  REGION 1..12: note = Description of Artificial Sequence: Synthetic peptide
VPWGDYHPGNVY

SEQ ID NO: 330 - protein, 12 aa, synthetic construct
  REGION 1..12: note = Description of Artificial Sequence: Synthetic peptide
VPWGDYHPGNVY

SEQ ID NO: 331 - protein, 12 aa, synthetic construct
  REGION 1..12: note = Description of Artificial Sequence: Synthetic peptide
VPWGDYHPRDVY

SEQ ID NO: 332 - protein, 12 aa, synthetic construct
  REGION 1..12: note = Description of Artificial Sequence: Synthetic peptide
VPWGDYHPRNVT

SEQ ID NO: 333 - protein, 12 aa, synthetic construct
  REGION 1..12: note = Description of Artificial Sequence: Synthetic peptide
VPWGDYHPRNVA

SEQ ID NO: 334 - protein, 12 aa, synthetic construct
  REGION 1..12: note = Description of Artificial Sequence: Synthetic peptide
VPWGDYHPRNVT

SEQ ID NO: 335 - protein, 12 aa, synthetic construct
  REGION 1..12: note = Description of Artificial Sequence: Synthetic peptide
VPWGDYHPRNVY

SEQ ID NO: 336 - protein, 12 aa, synthetic construct
  REGION 1..12: note = Description of Artificial Sequence: Synthetic peptide
VPWGDYHPRNVY

SEQ ID NO: 337 - protein, 12 aa, synthetic construct
  REGION 1..12: note = Description of Artificial Sequence: Synthetic peptide
VPWGDYHPRNVV

SEQ ID NO: 338 - protein, 12 aa, synthetic construct
  REGION 1..12: note = Description of Artificial Sequence: Synthetic peptide
VPWGDYHPRNVV

SEQ ID NO: 339 - protein, 12 aa, synthetic construct
  REGION 1..12: note = Description of Artificial Sequence: Synthetic peptide
VPWGDYHPGNVY

SEQ ID NO: 340 - protein, 12 aa, synthetic construct
  REGION 1..12: note = Description of Artificial Sequence: Synthetic peptide
VPWGDYHPRNVY

SEQ ID NO: 341 - protein, 12 aa, synthetic construct
  REGION 1..12: note = Description of Artificial Sequence: Synthetic peptide
VPWGDYHPGNVY

SEQ ID NO: 342 - protein, 12 aa, synthetic construct
  REGION 1..12: note = Description of Artificial Sequence: Synthetic peptide
VPWGDYHPGNVY

SEQ ID NO: 343 - protein, 12 aa, synthetic construct
  REGION 1..12: note = Description of Artificial Sequence: Synthetic peptide
VPWGDYHPGNVY

SEQ ID NO: 344 - protein, 12 aa, synthetic construct
  REGION 1..12: note = Description of Artificial Sequence: Synthetic peptide
VPWGDYHPGNVY

SEQ ID NO: 345 - protein, 12 aa, synthetic construct
  REGION 1..12: note = Description of Artificial Sequence: Synthetic peptide
VPWGDYHPRNVY

SEQ ID NO: 346 - protein, 119 aa, synthetic construct
  REGION 1..119: note = Description of Artificial Sequence: Synthetic polypeptide
EVQLVESGGGLVQPGRSLTLSCAASTNIFSISPMGWYRQAPGKQRELVAAIHGFSTLYADSVKGRFTISRDNAKNSIYLQMNSLRPEDTALYYCNKVPWGDYHPRNVYWGQGTQVTVSS

SEQ ID NO: 347 - protein, 119 aa, synthetic construct
  REGION 1..119: note = Description of Artificial Sequence: Synthetic polypeptide
EVQLVESGGGLVQPGRSLTLSCAASTDIFSISPMGWYRQAPGKQRELVAAIHGGSTLYADSVKGRFTISRDNAKNSIYLQMNSLRPEDTALYYCNKVPWGDYHPRNVAWGQGTQVTVSS

SEQ ID NO: 348 - protein, 119 aa, synthetic construct
  REGION 1..119: note = Description of Artificial Sequence: Synthetic polypeptide
EVQLVESGGGLVQPGRSLTLSCAASTNDFSISPMGWYRQAPGKQRELVAAIHGGSTLYADSVKGRFTISRDNAKNSIYLQMNSLRPEDTALYYCNKVPWGDYHPRNVAWGQGTQVTVSS

SEQ ID NO: 349 - protein, 119 aa, synthetic construct
  REGION 1..119: note = Description of Artificial Sequence: Synthetic polypeptide
EVQLVESGGGLVQPGRSLTLSCAASTNIFSKSPMGWYRQAPGKQRELVAAIHGKSTLYADSVKGRFTISRDNAKNSIYLQMNSLRPEDTALYYCNKVPWGDYHPRNVVWGQGTQVTVSS

SEQ ID NO: 350 - protein, 119 aa, synthetic construct
  REGION 1..119: note = Description of Artificial Sequence: Synthetic polypeptide
EVQLVESGGGLVQPGRSLTLSCAASTNDFSISPMGWYRQAPGKQRELVAAIHGKSTLYADSVKGRFTISRDNAKNSIYLQMNSLRPEDTALYYCNKVPWGDYHPRNVKWGQGTQVTVSS

SEQ ID NO: 351 - protein, 119 aa, synthetic construct
  REGION 1..119: note = Description of Artificial Sequence: Synthetic polypeptide
EVQLVESGGGLVQPGRSLTLSCAASTNQFSISPMGWYRQAPGKQRELVAAIHGKSTLYADSVKGRFTISRDNAKNSIYLQMNSLRPEDTALYYCNKVPWGDYHPRNVVWGQGTQVTVSS

SEQ ID NO: 352 - protein, 119 aa, synthetic construct
  REGION 1..119: note = Description of Artificial Sequence: Synthetic polypeptide
EVQLVESGGGLVQPGRSLTLSCAASTNIFSSSPMGWYRQAPGKQRELVAAINGFSTLYADSVKGRFTISRDNAKNSIYLQMNSLRPEDTALYYCNKVPWGDYHPRNVHWGQGTQVTVSS

SEQ ID NO: 353 - protein, 119 aa, synthetic construct
  REGION 1..119: note = Description of Artificial Sequence: Synthetic polypeptide
EVQLVESGGGLVQPGRSLTLSCAASTNIFSSSPMGWYRQAPGKQRELVAAIHGFSTLYADSVKGRFTISRDNAKNSIYLQMNSLRPEDTALYYCNKVPWGDYHPRNVYWGQGTQVTVSS

SEQ ID NO: 354 - protein, 119 aa, synthetic construct
  REGION 1..119: note = Description of Artificial Sequence: Synthetic polypeptide
EVQLVESGGGLVQPGRSLTLSCAASTNIFSTSPMGWYRQAPGKQRELVAAIHGFQTLYADSVKGRFTISRDNAKNSIYLQMNSLRPEDTALYYCNKVPWGDYHPRNVVWGQGTQVTVSS

SEQ ID NO: 355 - protein, 119 aa, synthetic construct
  REGION 1..119: note = Description of Artificial Sequence: Synthetic polypeptide
EVQLVESGGGLVQPGRSLTLSCAASTNIFSRSPMGWYRQAPGKQRELVAAIHGFETLYADSVKGRFTISRDNAKNSIYLQMNSLRPEDTALYYCNKVPWGDYHPRNVLWGQGTQVTVSS

SEQ ID NO: 356 - protein, 119 aa, synthetic construct
  REGION 1..119: note = Description of Artificial Sequence: Synthetic polypeptide
EVQLVESGGGLVQPGRSLTLSCAASTNIFSESPMGWYRQAPGKQRELVAAIHGFTTLYADSVKGRFTISRDNAKNSIYLQMNSLRPEDTALYYCNKVPWGDYHPRNVTWGQGTQVTVSS

SEQ ID NO: 357 - protein, 119 aa, synthetic construct
  REGION 1..119: note = Description of Artificial Sequence: Synthetic polypeptide
EVQLVESGGGLVQPGRSLTLSCAASTNIFSDSPMGWYRQAPGKQRELVAAIHGFSTLYADSVKGRFTISRDNAKNSIYLQMNSLRPEDTALYYCNKVPWGDYHPRNVAWGQGTQVTVSS

SEQ ID NO: 358 - protein, 119 aa, synthetic construct
  REGION 1..119: note = Description of Artificial Sequence: Synthetic polypeptide
EVQLVESGGGLVQPGRSLTLSCAASTNIFSNSPMGWYRQAPGKQRELVAAIHGGSTLYADSVKGRFTISRDNAKNSIYLQMNSLRPEDTALYYCNKVPWGDYHPRNVHWGQGTQVTVSS

SEQ ID NO: 359 - protein, 119 aa, synthetic construct
  REGION 1..119: note = Description of Artificial Sequence: Synthetic polypeptide
EVQLVESGGGLVQPGRSLTLSCAASTNIFSNSPMGWYRQAPGKQRELVAAIHGRSTLYADSVKGRFTISRDNAKNSIYLQMNSLRPEDTALYYCNKVPWGDYHPRNVMWGQGTQVTVSS

SEQ ID NO: 360 - protein, 119 aa, synthetic construct
  REGION 1..119: note = Description of Artificial Sequence: Synthetic polypeptide
EVQLVESGGGLVQPGRSLTLSCAASTNIFSNSPMGWYRQAPGKQRELVAAIHGPSTLYADSVKGRFTISRDNAKNSIYLQMNSLRPEDTALYYCNKVPWGDYHPRNVTWGQGTQVTVSS

SEQ ID NO: 361 - protein, 119 aa, synthetic construct
  REGION 1..119: note = Description of Artificial Sequence: Synthetic polypeptide
EVQLVESGGGLVQPGRSLTLSCAASTNIFSNSPMGWYRQAPGKQRELVAAIHGDSTLYADSVKGRFTISRDNAKNSIYLQMNSLRPEDTALYYCNKVPWGDYHPRNVRWGQGTQVTVSS

SEQ ID NO: 362 - protein, 119 aa, synthetic construct
  REGION 1..119: note = Description of Artificial Sequence: Synthetic polypeptide
EVQLVESGGGLVQPGRSLTLSCAASTNIFSRSPMGWYRQAPGKQRELVAAIHGDSTLYADSVKGRFTISRDNAKNSIYLQMNSLRPEDTALYYCNKVPWGDYHPRNVTWGQGTQVTVSS

SEQ ID NO: 363 - protein, 119 aa, synthetic construct
  REGION 1..119: note = Description of Artificial Sequence: Synthetic polypeptide
EVQLVESGGGLVQPGRSLTLSCAASTNIFSKSPMGWYRQAPGKQRELVAAIHGQSTLYADSVKGRFTISRDNAKNSIYLQMNSLRPEDTALYYCNKVPWGDYHPRNVTWGQGTQVTVSS

SEQ ID NO: 364 - protein, 119 aa, synthetic construct
  REGION 1..119: note = Description of Artificial Sequence: Synthetic polypeptide
EVQLVESGGGLVQPGRSLTLSCAASTNIFSSSPMGWYRQAPGKQRELVAAIHGHSTLYADSVKGRFTISRDNAKNSIYLQMNSLRPEDTALYYCNKVPWGDYHPRNVTWGQGTQVTVSS

SEQ ID NO: 365 - protein, 119 aa, synthetic construct
  REGION 1..119: note = Description of Artificial Sequence: Synthetic polypeptide
EVQLVESGGGLVQPGRSLTLSCAASTNIFSSSPMGWYRQAPGKQRELVAAIHGESTLYADSVKGRFTISRDNAKNSIYLQMNSLRPEDTALYYCNKVPWGDYHPRKVYWGQGTQVTVSS

SEQ ID NO: 366 - protein, 119 aa, synthetic construct
  REGION 1..119: note = Description of Artificial Sequence: Synthetic polypeptide
EVQLVESGGGLVQPGRSLTLSCAASTNIFSRSPMGWYRQAPGKQRELVAAIHGNSTLYADSVKGRFTISRDNAKNSIYLQMNSLRPEDTALYYCNKVPWGIYHPRNVYWGQGTQVTVSS

SEQ ID NO: 367 - protein, 119 aa, synthetic construct
  REGION 1..119: note = Description of Artificial Sequence: Synthetic polypeptide
EVQLVESGGGLVQPGRSLTLSCAASTNIFSESPMGWYRQAPGKQRELVAAIHGNSTLYADSVKGRFTISRDNAKNSIYLQMNSLRPEDTALYYCNKVPWGTYHPRNVYWGQGTQVTVSS

SEQ ID NO: 368 - protein, 119 aa, synthetic construct
  REGION 1..119: note = Description of Artificial Sequence: Synthetic polypeptide
EVQLVESGGGLVQPGRSLTLSCAASTNIFSVSPMGWYRQAPGKQRELVAAIHGNSTLYADSVKGRFTISRDNAKNSIYLQMNSLRPEDTALYYCNKVPWGKYHPRNVYWGQGTQVTVSS

SEQ ID NO: 369 - protein, 119 aa, synthetic construct
  REGION 1..119: note = Description of Artificial Sequence: Synthetic polypeptide
EVQLVESGGGLVQPGRSLTLSCAASTNIFSVSPMGWYRQAPGKQRELVAAIHGNSTLYADSVKGRFTISRDNAKNSIYLQMNSLRPEDTALYYCNKVPWGDYHPRNVYWGQGTQVTVSS

SEQ ID NO: 370 - protein, 119 aa, synthetic construct
  REGION 1..119: note = Description of Artificial Sequence: Synthetic polypeptide
EVQLVESGGGLVQPGRSLTLSCAASTNIFSKSPMGWYRQAPGKQRELVAAIHGNSTLYADSVKGRFTISRDNAKNSIYLQMNSLRPEDTALYYCNKVPWGDYHPREVYWGQGTQVTVSS

SEQ ID NO: 371 - protein, 119 aa, synthetic construct
  REGION 1..119: note = Description of Artificial Sequence: Synthetic polypeptide
EVQLVESGGGLVQPGRSLTLSCAASTNIFSDSPMGWYRQAPGKQRELVAAIHGTSTLYADSVKGRFTISRDNAKNSIYLQMNSLRPEDTALYYCNKVPWGDYHPRNVYWGQGTQVTVSS

SEQ ID NO: 372 - protein, 119 aa, synthetic construct
  REGION 1..119: note = Description of Artificial Sequence: Synthetic polypeptide
EVQLVESGGGLVQPGRSLTLSCAASTNIFSRSPMGWYRQAPGKQRELVAAIHGTSTLYADSVKGRFTISRDNAKNSIYLQMNSLRPEDTALYYCNKVPWGKYHPRNVYWGQGTQVTVSS

SEQ ID NO: 373 - protein, 119 aa, synthetic construct
  REGION 1..119: note = Description of Artificial Sequence: Synthetic polypeptide
EVQLVESGGGLVQPGRSLTLSCAASTNIFSHSPMGWYRQAPGKQRELVAAIHGTSTLYADSVKGRFTISRDNAKNSIYLQMNSLRPEDTALYYCNKVPWGRYHPRNVYWGQGTQVTVSS

SEQ ID NO: 374 - protein, 119 aa, synthetic construct
  REGION 1..119: note = Description of Artificial Sequence: Synthetic polypeptide
EVQLVESGGGLVQPGRSLTLSCAASTNIFSTSPMGWYRQAPGKQRELVAAIHGTSTLYADSVKGRFTISRDNAKNSIYLQMNSLRPEDTALYYCNKVPWGDYHPGNVYWGQGTQVTVSS

SEQ ID NO: 375 - protein, 119 aa, synthetic construct
  REGION 1..119: note = Description of Artificial Sequence: Synthetic polypeptide
EVQLVESGGGLVQPGRSLTLSCAASTNIFSTSPMGWYRQAPGKQRELVAAIHGTSTLYADSVKGRFTISRDNAKNSIYLQMNSLRPEDTALYYCNKVPWGDYHPRNVQWGQGTQVTVSS

SEQ ID NO: 376 - protein, 119 aa, synthetic construct
  REGION 1..119: note = Description of Artificial Sequence: Synthetic polypeptide
EVQLVESGGGLVQPGRSLTLSCAASTNIFSLSPMGWYRQAPGKQRELVAAIHGDSTLYADSVKGRFTISRDNAKNSIYLQMNSLRPEDTALYYCNKVPWGDYHPRNVYWGQGTQVTVSS

SEQ ID NO: 377 - protein, 119 aa, synthetic construct
  REGION 1..119: note = Description of Artificial Sequence: Synthetic polypeptide
EVQLVESGGGLVQPGRSLTLSCAASTNIFSISPGGWYRQAPGKQRELVAAIHGSSTLYADSVKGRFTISRDNAKNSIYLQMNSLRPEDTALYYCNKVPWGDYHPRNVYWGQGTQVTVSS

SEQ ID NO: 378 - protein, 119 aa, synthetic construct
  REGION 1..119: note = Description of Artificial Sequence: Synthetic polypeptide
EVQLVESGGGLVQPGRSLTLSCAASTNHFSISPMGWYRQAPGKQRELVAAIHGSSTLYADSVKGRFTISRDNAKNSIYLQMNSLRPEDTALYYCNKVPWGDYHPRVVYWGQGTQVTVSS

SEQ ID NO: 379 - protein, 119 aa, synthetic construct
  REGION 1..119: note = Description of Artificial Sequence: Synthetic polypeptide
EVQLVESGGGLVQPGRSLTLSCAASTNIFSASPMGWYRQAPGKQRELVAAIHGSSTLYADSVKGRFTISRDNAKNSIYLQMNSLRPEDTALYYCNKVPWGDYHPRNVNWGQGTQVTVSS

SEQ ID NO: 380 - protein, 119 aa, synthetic construct
  REGION 1..119: note = Description of Artificial Sequence: Synthetic polypeptide
EVQLVESGGGLVQPGRSLTLSCAASTNIFSASPMGWYRQAPGKQRELVAAIHGSSTLYADSVKGRFTISRDNAKNSIYLQMNSLRPEDTALYYCNKVPWGRYHPRNVYWGQGTQVTVSS

SEQ ID NO: 381 - protein, 119 aa, synthetic construct
  REGION 1..119: note = Description of Artificial Sequence: Synthetic polypeptide
EVQLVESGGGLVQPGRSLTLSCAASTNISSISPMGWYRQAPGKQRELVAAIHGTSTLYADSVKGRFTISRDNAKNSIYLQMNSLRPEDTALYYCNKVPWGDYHPGNVYWGQGTQVTVSS

SEQ ID NO: 382 - protein, 119 aa, synthetic construct
  REGION 1..119: note = Description of Artificial Sequence: Synthetic polypeptide
EVQLVESGGGLVQPGRSLTLSCAASTNIESISPMGWYRQAPGKQRELVAAIHGTSTLYADSVKGRFTISRDNAKNSIYLQMNSLRPEDTALYYCNKVPWGDYHPGNVYWGQGTQVTVSS

SEQ ID NO: 383 - protein, 119 aa, synthetic construct
  REGION 1..119: note = Description of Artificial Sequence: Synthetic polypeptide
EVQLVESGGGLVQPGRSLTLSCAASTNIFSISPYGWYRQAPGKQRELVAAIHGTSTLYADSVKGRFTISRDNAKNSIYLQMNSLRPEDTALYYCNKVPWGDYHPGNVYWGQGTQVTVSS

SEQ ID NO: 384 - protein, 119 aa, synthetic construct
  REGION 1..119: note = Description of Artificial Sequence: Synthetic polypeptide
EVQLVESGGGLVQPGRSLTLSCAASTNIASISPMGWYRQAPGKQRELVAAIHGTSTLYADSVKGRFTISRDNAKNSIYLQMNSLRPEDTALYYCNKVPWGDYHPGNVYWGQGTQVTVSS

SEQ ID NO: 385 - protein, 119 aa, synthetic construct
  REGION 1..119: note = Description of Artificial Sequence: Synthetic polypeptide
EVQLVESGGGLVQPGRSLTLSCAASTNIASISPMGWYRQAPGKQRELVAAIHGKSTLYADSVKGRFTISRDNAKNSIYLQMNSLRPEDTALYYCNKVPWGDYHPGNVYWGQGTQVTVSS

SEQ ID NO: 386 - protein, 119 aa, synthetic construct
  REGION 1..119: note = Description of Artificial Sequence: Synthetic polypeptide
EVQLVESGGGLVQPGRSLTLSCAASTNIASISPMGWYRQAPGKQRELVAAIHGSSTLYADSVKGRFTISRDNAKNSIYLQMNSLRPEDTALYYCNKVPWGDYHPGNVYWGQGTQVTVSS

SEQ ID NO: 387 - protein, 119 aa, synthetic construct
  REGION 1..119: note = Description of Artificial Sequence: Synthetic polypeptide
EVQLVESGGGLVQPGRSLTLSCAASTNITSISPMGWYRQAPGKQRELVAAIHGDSTLYADSVKGRFTISRDNAKNSIYLQMNSLRPEDTALYYCNKVPWGDYHPGNVYWGQGTQVTVSS

SEQ ID NO: 388 - protein, 119 aa, synthetic construct
  REGION 1..119: note = Description of Artificial Sequence: Synthetic polypeptide
EVQLVESGGGLVQPGRSLTLSCAASTNIMSISPMGWYRQAPGKQRELVAAIHGNSTLYADSVKGRFTISRDNAKNSIYLQMNSLRPEDTALYYCNKVPWGDYHPGNVYWGQGTQVTVSS

SEQ ID NO: 389 - protein, 119 aa, synthetic construct
  REGION 1..119: note = Description of Artificial Sequence: Synthetic polypeptide
EVQLVESGGGLVQPGRSLTLSCAASTNITSISPMGWYRQAPGKQRELVAAIHGNSTLYADSVKGRFTISRDNAKNSIYLQMNSLRPEDTALYYCNKVPWGDYHPGNVYWGQGTQVTVSS

SEQ ID NO: 390 - protein, 119 aa, synthetic construct
  REGION 1..119: note = Description of Artificial Sequence: Synthetic polypeptide
EVQLVESGGGLVQPGRSLTLSCAASTNIVSISPMGWYRQAPGKQRELVAAIHGHSTLYADSVKGRFTISRDNAKNSIYLQMNSLRPEDTALYYCNKVPWGDYHPGNVYWGQGTQVTVSS

SEQ ID NO: 391 - protein, 119 aa, synthetic construct
  REGION 1..119: note = Description of Artificial Sequence: Synthetic polypeptide
EVQLVESGGGLVQPGRSLTLSCAASTNIVSISPMGWYRQAPGKQRELVAAIHGKSTLYADSVKGRFTISRDNAKNSIYLQMNSLRPEDTALYYCNKVPWGDYHPGNVYWGQGTQVTVSS

SEQ ID NO: 392 - protein, 119 aa, synthetic construct
  REGION 1..119: note = Description of Artificial Sequence: Synthetic polypeptide
EVQLVESGGGLVQPGRSLTLSCAASTNVVSISPMGWYRQAPGKQRELVAAIHGKSTLYADSVKGRFTISRDNAKNSIYLQMNSLRPEDTALYYCNKVPWGDYHPNNVYWGQGTQVTVSS

SEQ ID NO: 393 - protein, 119 aa, synthetic construct
  REGION 1..119: note = Description of Artificial Sequence: Synthetic polypeptide
EVQLVESGGGLVQPGRSLTLSCAASTNIISISPMGWYRQAPGKQRELVAAIHGASTLYADSVKGRFTISRDNAKNSIYLQMNSLRPEDTALYYCNKVPWGDYHPGNVYWGQGTQVTVSS

SEQ ID NO: 394 - protein, 119 aa, synthetic construct
  REGION 1..119: note = Description of Artificial Sequence: Synthetic polypeptide
EVQLVESGGGLVQPGRSLTLSCAASTNIFSITPMGWYRQAPGKQRELVAAIHGASTLYADSVKGRFTISRDNAKNSIYLQMNSLRPEDTALYYCNKVPWGDYHPGNVYWGQGTQVTVSS

SEQ ID NO: 395 - protein, 119 aa, synthetic construct
  REGION 1..119: note = Description of Artificial Sequence: Synthetic polypeptide
EVQLVESGGGLVQPGRSLTLSCAASTNITSISPMGWYRQAPGKQRELVAAIHGFETLYADSVKGRFTISRDNAKNSIYLQMNSLRPEDTALYYCNKVPWGDYHPGNVYWGQGTQVTVSS

SEQ ID NO: 396 - protein, 119 aa, synthetic construct
  REGION 1..119: note = Description of Artificial Sequence: Synthetic polypeptide
EVQLVESGGGLVQPGRSLTLSCAASTNIQSISPMGWYRQAPGKQRELVAAIHGFETLYADSVKGRFTISRDNAKNSIYLQMNSLRPEDTALYYCNKVPWGDYHPGNVYWGQGTQVTVSS

SEQ ID NO: 397 - protein, 119 aa, synthetic construct
  REGION 1..119: note = Description of Artificial Sequence: Synthetic polypeptide
EVQLVESGGGLVQPGRSLTLSCAASTSDFSISPMGWYRQAPGKQRELVAAIHGFETLYADSVKGRFTISRDNAKNSIYLQMNSLRPEDTALYYCNKVPWGDYHPGNVYWGQGTQVTVSS

SEQ ID NO: 398 - protein, 119 aa, synthetic construct
  REGION 1..119: note = Description of Artificial Sequence: Synthetic polypeptide
EVQLVESGGGLVQPGRSLTLSCAASTNIDSISPMGWYRQAPGKQRELVAAIHGFQTLYADSVKGRFTISRDNAKNSIYLQMNSLRPEDTALYYCNKVPWGDYHPGNVYWGQGTQVTVSS

SEQ ID NO: 399 - protein, 119 aa, synthetic construct
  REGION 1..119: note = Description of Artificial Sequence: Synthetic polypeptide
EVQLVESGGGLVQPGRSLTLSCAASTNIMSISPMGWYRQAPGKQRELVAAIHGFSTVYADSVKGRFTISRDNAKNSIYLQMNSLRPEDTALYYCNKVPWGDYHPGNVYWGQGTQVTVSS

SEQ ID NO: 400 - protein, 119 aa, synthetic construct
  REGION 1..119: note = Description of Artificial Sequence: Synthetic polypeptide
EVQLVESGGGLVQPGRSLTLSCAASTNIESISPMGWYRQAPGKQRELVAAIHGFSTLYADSVKGRFTISRDNAKNSIYLQMNSLRPEDTALYYCNKVPWGDYHPGNVYWGQGTQVTVSS

SEQ ID NO: 401 - protein, 119 aa, synthetic construct
  REGION 1..119: note = Description of Artificial Sequence: Synthetic polypeptide
EVQLVESGGGLVQPGRSLTLSCAASTNIFSSSPMGWYRQAPGKQRELVAAIHGFKTLYADSVKGRFTISRDNAKNSIYLQMNSLRPEDTARYYCNKVPWGDYHPGNVYWGQGTQVTVSS

SEQ ID NO: 402 - protein, 119 aa, synthetic construct
  REGION 1..119: note = Description of Artificial Sequence: Synthetic polypeptide
EVQLVESGGGLVQPGRSLTLSCAASTNIFSSSPMGWYRQAPGKQRELVAAIHGFSTLYADSVKGRFTISRDNAKNSIYLQMNSLRPEDTALYYCNKVPWGDYHPGNVYWGQGTQVTVSS

SEQ ID NO: 403 - protein, 119 aa, synthetic construct
  REGION 1..119: note = Description of Artificial Sequence: Synthetic polypeptide
EVQLVESGGGLVQPGRSLTLSCAASTNIFSNSPMGWYRQAPGKQRELVAAIHGFSTLYADSVKGRFTISRDNAKNSIYLQMNSLRPEDTALYYCNKVPWGDYHPGNVYWGQGTQVTVSS

SEQ ID NO: 404 - protein, 119 aa, synthetic construct
  REGION 1..119: note = Description of Artificial Sequence: Synthetic polypeptide
EVQLVESGGGLVQPGRSLTLSCAASTNIFSTSPMGWYRQAPGKQRELVAAIHGFSTIYADSVKGRFTISRDNAKNSIYLQMNSLRPEDTALYYCNKVPWGDYHPGNVYWGQGTQVTVSS

SEQ ID NO: 405 - protein, 119 aa, synthetic construct
  REGION 1..119: note = Description of Artificial Sequence: Synthetic polypeptide
EVQLVESGGGLVQPGRSLTLSCAASTNIFSTSPMGWYRQAPGKQRELVAAIHGFSTIYADSVKGRFTISRDNAKNSIYLQMNSLRPEDTALYYCNKVPWGDYHPLNVYWGQGTQVTVSS

SEQ ID NO: 406 - protein, 119 aa, synthetic construct
  REGION 1..119: note = Description of Artificial Sequence: Synthetic polypeptide
EVQLVESGGGLVQPGRSLTLSCVASTNIFSTSPMGWYRQAPGKQRELVAAIHGFSTLYADSVKGRFTISRDNAKNSIYLQMNSLRPEDTALYYCNKVPWGDYHPGNVYWGQGTQVTVSS

SEQ ID NO: 407 - protein, 119 aa, synthetic construct
  REGION 1..119: note = Description of Artificial Sequence: Synthetic polypeptide
EVQLVESGGGLVQPGRSLTLSCAASTNIFSDSPMGWYRQAPGKQRELVAAIHGFSTFYADSVKGRFTISRDNAKNSIYLQMNSLRPEDTALYYCNKVPWGDYHPGNVYWGQGTQVTVSS

SEQ ID NO: 408 - protein, 119 aa, synthetic construct
  REGION 1..119: note = Description of Artificial Sequence: Synthetic polypeptide
EVQLVESGGGLVQPGRSLTLSCAASTNIFSQSPMGWYRQAPGKQRELVAAIHGDSTLYADSVKGRFTISRDNAKNSIYLQMNSLRPEDTALYYCNKVPWGDYHPGNVCWGQGTQVTVSS

SEQ ID NO: 409 - protein, 119 aa, synthetic construct
  REGION 1..119: note = Description of Artificial Sequence: Synthetic polypeptide
EVQLVESGGGLVQPGRSLTLSCAASTNIFSQSPMGWYRQAPGKQRELVAAIHGKSTLYADSVKGRFTISRDNAKNSIYLQMNSLRPEDTALYYCNKVPWGDYHPSNVYWGKGTQVTVSS

SEQ ID NO: 410 - protein, 119 aa, synthetic construct
  REGION 1..119: note = Description of Artificial Sequence: Synthetic polypeptide
EVQLVESGGGLVQPGRSLTLSCAASTNIFSRSPMGWYRQAPGKQRELVAAIHGESTLYADSVKGRFTISRDNAKNSIYLQMNSLRPEDTALYYCNKVPWGRYHPGNVYWGQGTQVTVSS

SEQ ID NO: 411 - protein, 119 aa, synthetic construct
  REGION 1..119: note = Description of Artificial Sequence: Synthetic polypeptide
EVQLVESGGGLVQPGRSLTLSCAASTNIFSRSPMGWYRQAPGKQRELVAAIHGISTLYADSVKGRFTISRDNAKNSIYLQMNSLRPEDTALYYCNKVPWGDYHPGNVYWGQGTQVTVSS

SEQ ID NO: 412 - protein, 119 aa, synthetic construct
  REGION 1..119: note = Description of Artificial Sequence: Synthetic polypeptide
EVQLVESGGGLVQPGRSLTLSCAASTNIFSRSPMGWYRQAPGKQRELVAAIHGSSTLYADSVKGRFTISRDNAKNSIYLQMNSLRPEDTALYYCNKVPWGDYHPGNVYWGQGTQVTVSS

SEQ ID NO: 413 - protein, 119 aa, synthetic construct
  REGION 1..119: note = Description of Artificial Sequence: Synthetic polypeptide
EVQLVESGGGLVQPGRSLTLSCAASTNIFSGSPMGWYRQAPGKQRELVAAIHGNSTLYADSVKGRFTISRDNAKNSIYLQMNSLRPEDTALYYCNKVPWGDYHPGNVYWGQGTQVTVSS

SEQ ID NO: 414 - protein, 119 aa, synthetic construct
  REGION 1..119: note = Description of Artificial Sequence: Synthetic polypeptide
EVQLVESGGGLVQPGRSLTLSCAASSNIFSISPMGWYRQAPGKQRELVAAIHGSSTLYADSVKGRFTISRDNAKNSIYLQMNSLRPEDTALYYCNKVPWGDYHPGNVYWGQGTQVTVSS

SEQ ID NO: 415 - protein, 119 aa, synthetic construct
  REGION 1..119: note = Description of Artificial Sequence: Synthetic polypeptide
EVQLVESGGGLVQPGRSLTLSCAASTNIFSIYPMGWYRQAPGKQRELVAAIHGSSTLYADSVKGRFTISRDNAKNSIYLQMNSLRPEDTALYYCNKVPWGDYHPKNVYWGQGTQVTVSS

SEQ ID NO: 416 - protein, 119 aa, synthetic construct
  REGION 1..119: note = Description of Artificial Sequence: Synthetic polypeptide
EVQLVESGGGLVQPGRSLTLSCAASTNIFSKSPMGWYRQAPGKQRELVAAIHGSSTLYADSVKGRFTISRDNAKNSIYLQMNSLRPEDTALYYCNKVPWGDYHPGNVYWGQGTQVTVSS

SEQ ID NO: 417 - protein, 119 aa, synthetic construct
  REGION 1..119: note = Description of Artificial Sequence: Synthetic polypeptide
EVQLVESGGGLVQPGRSLTLSCAASTNIFSKSPMGWYRQAPGKQRELVAAIHGSSTLYADSVKGRFTISRDNAKNSIYLQMNSLRPEDTALYYCNKVPWGDYHPRNVYWGQGTQVTVSS

SEQ ID NO: 418 - protein, 119 aa, synthetic construct
  REGION 1..119: note = Description of Artificial Sequence: Synthetic polypeptide
EVQLVESGGGLVQPGRSLTLSCAASTNEFSISPMGWYRQAPGKQRELVAAIHGLSTLYADSVKGRFTISRDNAKNSIYLQMNSLRPEDTALYYCNKVPWGAYHPRNVYWGQGTQVTVSS

SEQ ID NO: 419 - protein, 119 aa, synthetic construct
  REGION 1..119: note = Description of Artificial Sequence: Synthetic polypeptide
EVQLVESGGGLVQPGRSLTLSCAASTNEFSISPMGWYRQAPGKQRELVAAIHGESTLYADSVKGRFTISRDNAKNSIYLQMNSLRPEDTALYYCNKVPWGDYHPGNVYWGQGTQVTVSS

SEQ ID NO: 420 - protein, 119 aa, synthetic construct
  REGION 1..119: note = Description of Artificial Sequence: Synthetic polypeptide
EVQLVESGGGLVQPGRSLTLSCAASTNIPSISPMGWYRQAPGKQRELVAAIHGESTLYADSVKGRFTISRDNAKNSIYLQMNSLRPEDTALYYCNKVPWGDYHPRNVAWGQGTQVTVSS

SEQ ID NO: 421 - protein, 119 aa, synthetic construct
  REGION 1..119: note = Description of Artificial Sequence: Synthetic polypeptide
EVQLVESGGGLVQPGRSLTLSCAASTNIPSISPMGWYRQAPGKQRELVAAIHGASTLYADSVKGRFTISRDNAKNSIYLQMNSLRPEDTALYYCNKVPWGDYHPRNVAWGQGTQVTVSS

SEQ ID NO: 422 - protein, 119 aa, synthetic construct
  REGION 1..119: note = Description of Artificial Sequence: Synthetic polypeptide
EVQLVESGGGLVQPGRSLTLSCAASTNIPSISPMGWYRQAPGKQRELVAAIHGESTLYADSVKGRFTISRDNAKNSIYLQMNSLRPEDTALYYCNKVPWGDYHPRNVYWGQGTQVTVSS

SEQ ID NO: 423 - protein, 119 aa, synthetic construct
  REGION 1..119: note = Description of Artificial Sequence: Synthetic polypeptide
EVQLVESGGGLVQPGRSLTLSCAASTNIPSISPMGWYRQAPGKQRELVAAIHGDSTLYADSVKGRFTISRDNAKNSIYLQMNSLRPEDTALYYCNKVPWGDYHPRNVYWGQGTQVTVSS

SEQ ID NO: 424 - protein, 119 aa, synthetic construct
  REGION 1..119: note = Description of Artificial Sequence: Synthetic polypeptide
EVQLVESGGGLVQPGRSLTLSCAASTNITSISPMGWYRQAPGKQRELVAAIHGVSTLYADSVKGRFTISRDNAKNSIYLQMNSLRPEDTALYYCNKVPWGDYHPRNVQWGQGTQVTVSS

SEQ ID NO: 425 - protein, 119 aa, synthetic construct
  REGION 1..119: note = Description of Artificial Sequence: Synthetic polypeptide
EVQLVESGGGLVQPGRSLTLSCAASTNIPSISPMGWYRQAPGKQRELVAAIHGQSTLYADSVKGRFTISRDNAKNSIYLQMNSLRPEDTALYYCNKVPWGDYHPRNVQWGQGTQVTVSS

SEQ ID NO: 426 - protein, 119 aa, synthetic construct
  REGION 1..119: note = Description of Artificial Sequence: Synthetic polypeptide
EVQLVESGGGLVQPGRSLTLSCAASTNIVSISPMGWYRQAPGKQRELVAAIHGDSTLYADSVKGRFTISRDNAKNSIYLQMNSLRPEDTALYYCNKVPWGDYHPRNVSWGQGTQVTVSS

SEQ ID NO: 427 - protein, 119 aa, synthetic construct
  REGION 1..119: note = Description of Artificial Sequence: Synthetic polypeptide
EVQLVESGGGLVQPGRSLTLSCAASSNIFSISPMGWYRQAPGKQRELVAAIHGESTLYADSVKGRFTISRDNAKNSIYLQMNSLRPEDTALYYCNKVPWGDYHPRNVTWGQGTQVTVSS

SEQ ID NO: 428 - protein, 119 aa, synthetic construct
  REGION 1..119: note = Description of Artificial Sequence: Synthetic polypeptide
EVQLVESGGGLVQPGRSLTLSCAASTNIDSISPMGWYRQAPGKQRELVAAIHGESTLYADSVKGRFTISRDNAKNSIYLQMNSLRPEDTALYYCNKVPWGDYHPRNVTWGQGTQVTVSS

SEQ ID NO: 429 - protein, 119 aa, synthetic construct
  REGION 1..119: note = Description of Artificial Sequence: Synthetic polypeptide
EVQLVESGGGLVQPGRSLTLSCAASTNIDSISPMGWYRQAPGKQRELVAAIHGSSTLYADSVKGRFTISRDNAKNSIYLQMNSLRPEDTALYYCNKVPWGDYHPRNVTWGQGTQVTVSS

SEQ ID NO: 430 - protein, 119 aa, synthetic construct
  REGION 1..119: note = Description of Artificial Sequence: Synthetic polypeptide
EVQLVESGGGLVQPGRSLTLSCAASTNIRSISPMGWYRQAPGKQRELVAAIHGSSTLYADSVKGRFTISRDNAKNSIYLQMNSLRPEDTALYYCNKVPWGDYHPRNVVWGQGTQVTVSS

SEQ ID NO: 431 - protein, 119 aa, synthetic construct
  REGION 1..119: note = Description of Artificial Sequence: Synthetic polypeptide
EVQLVESGGGLVQPGRSLTLSCAASTNITSISPMGWYRQAPGKQRELVAAISGFSTLYADSVKGRFTISRDNAKNSIYLQMNSLRPEDTALYYCNEVPWGDYHPRNVYWGQGTQVTVSS

SEQ ID NO: 432 - protein, 119 aa, synthetic construct
  REGION 1..119: note = Description of Artificial Sequence: Synthetic polypeptide
EVQLVESGGGLVQPGRSLTLSCAASTNITSISPMGWYRQAPGKQRELVAAIHGESTLYADSVKGRFTISRDNAKNSIYLQMNSLRPEDTALYYCNKVPWGDYHPRNVYWGQGTQVTVSS

SEQ ID NO: 433 - protein, 119 aa, synthetic construct
  REGION 1..119: note = Description of Artificial Sequence: Synthetic polypeptide
EVQLVESGGGLVQPGRSLTLSCAASTNITSVSPMGWYRQAPGKQRELVAAIHGPSTLYADSVKGRFTISRDNAKNSIYLQMNSLRPEDTALYYCNKVPWGDYHPTNVYWGQGTQVTVSS

SEQ ID NO: 434 - protein, 119 aa, synthetic construct
  REGION 1..119: note = Description of Artificial Sequence: Synthetic polypeptide
EVQLVESGGGLVQPGRSLTLSCAASTNIGSISPMGWYRQAPGKQRELVAAIHGQSTLYADSVKGRFTISRDNAKNSIYLQMNSLRPEDTALYYCNKVPWGDYHPQNVYWGQGTQVTVSS

SEQ ID NO: 435 - protein, 119 aa, synthetic construct
  REGION 1..119: note = Description of Artificial Sequence: Synthetic polypeptide
EVQLVESGGGLVQPGRSLTLSCAASTNIESISPMGWYRQAPGKQRELVAAIHGKSTLYADSVKGRFTISRDNAKNSIYLQMNSLRPEDTALYYCNKVPWGDYHPRRVYWGQGTQVTVSS

SEQ ID NO: 436 - protein, 119 aa, synthetic construct
  REGION 1..119: note = Description of Artificial Sequence: Synthetic polypeptide
EVQLVESGGGLVQPGRSLTLSCAASTNIVSISPMGWYRQAPGKQRELVAAIHGDSTLYADSVKGRFTISRDNAKNSIYLQMNSLRPEDTALYYCNKVPWGDYHPRRVYWGQGTQVTVSS

SEQ ID NO: 437 - protein, 119 aa, synthetic construct
  REGION 1..119: note = Description of Artificial Sequence: Synthetic polypeptide
EVQLVESGGGLVQPGRSLTLSCAASTNIDSISPMGWYRQAPGKQRELVAAIHGNSTLYADSVKGRFTISRDNAKNSIYLQMNSLRPEDTALYYCNKVPWGDYHPRMVYWGQGTQVTVSS

SEQ ID NO: 438 - protein, 119 aa, synthetic construct
  REGION 1..119: note = Description of Artificial Sequence: Synthetic polypeptide
EVQLVESGGGLVQPGRSLTLSCAASTNIFMISPMGWYRQAPGKQRELVAAIHGDSTLYADSVKGRFTISRDNAKNSIYLQMNSLRPEDTALYYCNKVPWGRYHPRNVYWGQGTQVTVSS

SEQ ID NO: 439 - protein, 119 aa, synthetic construct
  REGION 1..119: note = Description of Artificial Sequence: Synthetic polypeptide
EVQLVESGGGLVQPGRSLTLSCAASTNIFRISPMGWYRQAPGKQRELVAAIHGDSTLYADSVKGRFTISRDNAKNSIYLQMNSLRPEDTALYYCNKVPWGRYHPRNVYWGQGTQVTVSS

SEQ ID NO: 440 - protein, 119 aa, synthetic construct
  REGION 1..119: note = Description of Artificial Sequence: Synthetic polypeptide
EVQLVESGGGLVQPGRSLTLSCAASTNIFSISPMGWYRQAPGKQRELVAAIHGDSTLYADSVKGRFTISRDNAKNSIYLQMNSLRPEDTALYYCNKVPWGEYHPRNVYWGQGTQVTVSS

SEQ ID NO: 441 - protein, 119 aa, synthetic construct
  REGION 1..119: note = Description of Artificial Sequence: Synthetic polypeptide
EVQLVESGGGLVQPGRSLTLSCAASTNIFSISPMGWYRQAPGKQRELVAAIHGDSTLYADSVKGRFTISRDNAKNSIYLQMNSLRPEDTALYYCNKVPWGKYHPRNVYWGQGTQVTVSS

SEQ ID NO: 442 - protein, 119 aa, synthetic construct
  REGION 1..119: note = Description of Artificial Sequence: Synthetic polypeptide
EVQLVESGGGLVQPGRSLTLSCAASTNIESISPMGWYRQAPGKQRELVAAIHGSSTLYADSVKGRFTISRDNAKNSIYLQMNSLRPEDTALYYCNKVPWGRYHPRNVYWGQGTQVTVSS

SEQ ID NO: 443 - protein, 119 aa, synthetic construct
  REGION 1..119: note = Description of Artificial Sequence: Synthetic polypeptide
EVQLVESGGGLVQPGRSLTLSCAASTNIESISPMGWYRQAPGKQRELVAAIHGNSTLYADSVKGRFTISRDNAKNSIYLQMNSLRPEDTALYYCNKVPWGRYHPRNVYWGQGTQVTVSS

SEQ ID NO: 444 - protein, 119 aa, synthetic construct
  REGION 1..119: note = Description of Artificial Sequence: Synthetic polypeptide
EVQLVESGGGLVQPGRSLTLSCAASTNISSISPMGWYRQAPGKQRELVAAIHGFSTLYADSVKGRFTISRDNAKNSIYLQMNSLRPEDTALYYCNKVPWGYYHPRNVYWGQGTQVTVSS

SEQ ID NO: 445 - protein, 119 aa, synthetic construct
  REGION 1..119: note = Description of Artificial Sequence: Synthetic polypeptide
EVQLVESGGGLVQPGRSLTLSCAASTNISSISPMGWYRQAPGKQRELVAAIHGHSTLYADSVKGRFTISRDNAKNSIYLQMNSLRPEDTALYYCNKVPWGRYHPRNVYWGQGTQVTVSS

SEQ ID NO: 446 - protein, 119 aa, synthetic construct
  REGION 1..119: note = Description of Artificial Sequence: Synthetic polypeptide
EVQLVESGGGLVQPGRSLTLSCAASTNISSISPMGWYRQAPGKQRELVAAIHGFSTVYADSVKGRFTISRDNAKNSIYLQMNSLRPEDTALYYCNKVPWGRYHPRNVYWGQGTQVTVSS

SEQ ID NO: 447 - protein, 119 aa, synthetic construct
  REGION 1..119: note = Description of Artificial Sequence: Synthetic polypeptide
EVQLVESGGGLVQPGRSLTLSCAASTNIFSIRPMGWYRQAPGKQRELVAAIHGFSTVYADSVKGRFTISRDNAKNSIYLQMNSLRPEDTALYYCNKVPWGDYHPRNVYWGQGTQVTVSS

SEQ ID NO: 448 - protein, 119 aa, synthetic construct
  REGION 1..119: note = Description of Artificial Sequence: Synthetic polypeptide
EVQLVESGGGLVQPGRSLTLSCAASTNIFSIYPMGWYRQAPGKQRELVAAIHGFSTYYADSVKGRFTISRDNAKNSIYLQMNSLRPEDTALYYCNKVPWGSYHPRNVYWGQGTQVTVSS

SEQ ID NO: 449 - protein, 119 aa, synthetic construct
  REGION 1..119: note = Description of Artificial Sequence: Synthetic polypeptide
EVQLVESGGGLVQPGRSLTLSCAASTNIFNISPMGWYRQAPGKQRELVAAIHGFSTYYADSVKGRFTISRDNAKNSIYLQMNSLRPEDTALYYCNKVPWGRYHPRNVYWGQGTQVTVSS

SEQ ID NO: 450 - protein, 119 aa, synthetic construct
  REGION 1..119: note = Description of Artificial Sequence: Synthetic polypeptide
EVQLVESGGGLVQPGRSLTLSCAASTNIFSSSPMGWYRQAPGKQRELVAAIHGFSTWYADSVKGRFTISRDNAKNSIYLQMNSLRPEDTALYYCNKVPWGRYHPRNVYWGQGTQVTVSS

SEQ ID NO: 451 - protein, 119 aa, synthetic construct
  REGION 1..119: note = Description of Artificial Sequence: Synthetic polypeptide
EVQLVESGGGLVQPGRSLTLSCAASTNISSISPMGWYRQAPGKQRELVAAIHGFDTLYADSVKGRFTISRDNAKNSIYLQMNSLRPEDTALYYCNKVPWGDYHPRNVYWGQGTQVTVSS

SEQ ID NO: 452 - protein, 119 aa, synthetic construct
  REGION 1..119: note = Description of Artificial Sequence: Synthetic polypeptide
EVQLVESGGGLVQPGRSLTLSCAASTNIFSINPMGWYRQAPGKQRELVAAIHGFDTLYADSVKGRFTISRDNAKNSIYLQMNSLRPEDTALYYCNKVPWGDYHPRNVSWGQGTQVTVSS

SEQ ID NO: 453 - protein, 119 aa, synthetic construct
  REGION 1..119: note = Description of Artificial Sequence: Synthetic polypeptide
EVQLVESGGGLVQPGRSLTLSCAASTNIFSITPMGWYRQAPGKQRELVAAIHGRSTLYADSVKGRFTISRDNAKNSIYLQMNSLRPEDTALYYCNKVPWGSYHPRNVYWGQGTQVTVSS

SEQ ID NO: 454 - protein, 119 aa, synthetic construct
  REGION 1..119: note = Description of Artificial Sequence: Synthetic polypeptide
EVQLVESGGGLVQPGRSLTLSCAASTNIFSITPMGWYRQAPGKQRELVAAIHGTSTLYADSVKGRFTISRDNAKNSIYLQMNSLRPEDTALYYCNKVPWGRYHPRNVYWGQGTQVTVSS

SEQ ID NO: 455 - protein, 119 aa, synthetic construct
  REGION 1..119: note = Description of Artificial Sequence: Synthetic polypeptide
EVQLVESGGGLVQPGRSLTLSCAASTNIFSITPMGWYRQAPGKQRELVAAIHGESTLYADSVKGRFTISRDNAKNSIYLQMNSLRPEDTALYYCNKVPWGRYHPRNVYWGQGTQVTVSS

SEQ ID NO: 456 - protein, 119 aa, synthetic construct
  REGION 1..119: note = Description of Artificial Sequence: Synthetic polypeptide
EVQLVESGGGLVQPGRSLTLSCAASTNIFSITPMGWYRQAPGKQRELVAAIHGESTLYADSVKGRFTISRDNAKNSIYLQMNSLRPEDTALYYCNKVPWGDYHPRDVYWGQGTQVTVSS

SEQ ID NO: 457 - protein, 119 aa, synthetic construct
  REGION 1..119: note = Description of Artificial Sequence: Synthetic polypeptide
EVQLVESGGGLVQPGRSLTLSCAASTNIFSTSPYGWYRQAPGKQRELVAAIHGFSTIYADSVKGRFTISRDNAKNSIYLQMNSLRPEDTALYYCNKVPWGDYHPGNVYWGQGTQVTVSS

SEQ ID NO: 458 - protein, 119 aa, synthetic construct
  REGION 1..119: note = Description of Artificial Sequence: Synthetic polypeptide
EVQLVESGGGLVQPGRSLTLSCAASTNIFSTSPGGWYRQAPGKQRELVAAIHGFSTIYADSVKGRFTISRDNAKNSIYLQMNSLRPEDTALYYCNKVPWGDYHPGNVYWGQGTQVTVSS

SEQ ID NO: 459 - protein, 119 aa, synthetic construct
  REGION 1..119: note = Description of Artificial Sequence: Synthetic polypeptide
EVQLVESGGGLVQPGRSLTLSCAASTNIFSITPYGWYRQAPGKQRELVAAIHGASTLYADSVKGRFTISRDNAKNSIYLQMNSLRPEDTALYYCNKVPWGDYHPGNVYWGQGTQVTVSS

SEQ ID NO: 460 - protein, 119 aa, synthetic construct
  REGION 1..119: note = Description of Artificial Sequence: Synthetic polypeptide
EVQLVESGGGLVQPGRSLTLSCAASTNIFSITPGGWYRQAPGKQRELVAAIHGASTLYADSVKGRFTISRDNAKNSIYLQMNSLRPEDTALYYCNKVPWGDYHPGNVYWGQGTQVTVSS

SEQ ID NO: 461 - protein, 119 aa, synthetic construct
  REGION 1..119: note = Description of Artificial Sequence: Synthetic polypeptide
QVQLVESGGGLVQPGESLRLSCAASTNIFSISPMGWYRQAPGKQRELVAAIHGFSTLYADSVKGRFTISRDNAKNTIYLQMNSLKPEDTAVYYCNKVPWGDYHPRNVYWGQGTQVTVSS

SEQ ID NO: 462 - protein, 10 aa, synthetic construct
  REGION 1..10: note = Description of Artificial Sequence: Synthetic peptide
RFMISEYHMH

SEQ ID NO: 463 - protein, 10 aa, synthetic construct
  REGION 1..10: note = Description of Artificial Sequence: Synthetic peptide
RFMISPYSMH

SEQ ID NO: 464 - protein, 10 aa, synthetic construct
  REGION 1..10: note = Description of Artificial Sequence: Synthetic peptide
RFMISPYHMH

SEQ ID NO: 465 - protein, 10 aa, synthetic construct
  REGION 1..10: note = Description of Artificial Sequence: Synthetic peptide
RFMISEYSMH

SEQ ID NO: 466 - protein, 16 aa, synthetic construct
  REGION 1..16: note = Description of Artificial Sequence: Synthetic peptide
DINPAGTTDYAESVKG

SEQ ID NO: 467 - protein, 16 aa, synthetic construct
  REGION 1..16: note = Description of Artificial Sequence: Synthetic peptide
TINPAKTTDYAESVKG

SEQ ID NO: 468 - protein, 16 aa, synthetic construct
  REGION 1..16: note = Description of Artificial Sequence: Synthetic peptide
TINPAGQTDYAESVKG

SEQ ID NO: 469 - protein, 16 aa, synthetic construct
  REGION 1..16: note = Description of Artificial Sequence: Synthetic peptide
TINPAGTTDYAEYVKG

SEQ ID NO: 470 - protein, 16 aa, synthetic construct
  REGION 1..16: note = Description of Artificial Sequence: Synthetic peptide
DINPAKTTDYAESVKG

SEQ ID NO: 471 - protein, 16 aa, synthetic construct
  REGION 1..16: note = Description of Artificial Sequence: Synthetic peptide
DINPAGQTDYAESVKG

SEQ ID NO: 472 - protein, 16 aa, synthetic construct
  REGION 1..16: note = Description of Artificial Sequence: Synthetic peptide
DINPAGTTDYAEYVKG

SEQ ID NO: 473 - protein, 16 aa, synthetic construct
  REGION 1..16: note = Description of Artificial Sequence: Synthetic peptide
TINPAGTTDYAESVKG

SEQ ID NO: 474 - protein, 5 aa, synthetic construct
  REGION 1..5: note = Description of Artificial Sequence: Synthetic peptide
DSYGY

SEQ ID NO: 475 - protein, 5 aa, synthetic construct
  REGION 1..5: note = Description of Artificial Sequence: Synthetic peptide
DGYGY

SEQ ID NO: 476 - protein, 111 aa, synthetic construct
  REGION 1..111: note = Description of Artificial Sequence: Synthetic polypeptide
EVQLVESGGGLVQPGGSLTLSCAASRFMISEYSMHWVRQAPGKGLEWVSTINPAGTTDYAESVKGRFTISRDNAKNTLYLQMNSLKPEDTAVYYCDGYGYRGQGTQVTVSS

SEQ ID NO: 477 - protein, 111 aa, synthetic construct
  REGION 1..111: note = Description of Artificial Sequence: Synthetic polypeptide
EVQLVESGGGLVQPGGSLRLSCAASRFMISEYSMHWVRQAPGKGLEWVSTINPAGTTDYAESVKGRFTISRDNAKNTLYLQMNSLRAEDTAVYYCDGYGYRGQGTLVTVSS

SEQ ID NO: 478 - protein, 111 aa, synthetic construct
  REGION 1..111: note = Description of Artificial Sequence: Synthetic polypeptide
EVQLVESGGGLVQPGGSLRLSCAASRFMISEYHMHWVRQAPGKGLEWVSDINPAGTTDYAESVKGRFTISRDNAKNTLYLQMNSLRAEDTAVYYCDSYGYRGQGTLVTVSS

SEQ ID NO: 479 - protein, 111 aa, synthetic construct
  REGION 1..111: note = Description of Artificial Sequence: Synthetic polypeptide
EVQLVESGGGLVQPGGSLRLSCAASRFMISEYHMHWVRQAPGKGLEWVSTINPAGTTDYAESVKGRFTISRDNAKNTLYLQMNSLRAEDTAVYYCDSYGYRGQGTLVTVSS

SEQ ID NO: 480 - protein, 111 aa, synthetic construct
  REGION 1..111: note = Description of Artificial Sequence: Synthetic polypeptide
EVQLVESGGGLVQPGGSLRLSCAASRFMISEYSMHWVRQAPGKGLEWVSTINPAKTTDYAESVKGRFTISRDNAKNTLYLQMNSLRAEDTAVYYCDSYGYRGQGTLVTVSS

SEQ ID NO: 481 - protein, 111 aa, synthetic construct
  REGION 1..111: note = Description of Artificial Sequence: Synthetic polypeptide
EVQLVESGGGLVQPGGSLRLSCAASRFMISPYSMHWVRQAPGKGLEWVSTINPAGTTDYAESVKGRFTISRDNAKNTLYLQMNSLRAEDTAVYYCDGYGYRGQGTLVTVSS

SEQ ID NO: 482 - protein, 111 aa, synthetic construct
  REGION 1..111: note = Description of Artificial Sequence: Synthetic polypeptide
EVQLVESGGGLVQPGGSLRLSCAASRFMISEYSMHWVRQAPGKGLEWVSTINPAGQTDYAESVKGRFTISRDNAKNTLYLQMNSLRAEDTAVYYCDGYGYRGQGTLVTVSS

SEQ ID NO: 483 - protein, 111 aa, synthetic construct
  REGION 1..111: note = Description of Artificial Sequence: Synthetic polypeptide
EVQLVESGGGLVQPGGSLRLSCAASRFMISEYSMHWVRQAPGKGLEWVSTINPAGTTDYAEYVKGRFTISRDNAKNTLYLQMNSLRAEDTAVYYCDGYGYRGQGTLVTVSS

SEQ ID NO: 484 - protein, 111 aa, synthetic construct
  REGION 1..111: note = Description of Artificial Sequence: Synthetic polypeptide
EVQLVESGGGLVQPGGSLRLSCAASRFMISEYHMHWVRQAPGKGLEWVSDINPAKTTDYAESVKGRFTISRDNAKNTLYLQMNSLRAEDTAVYYCDSYGYRGQGTLVTVSS

SEQ ID NO: 485 - protein, 111 aa, synthetic construct
  REGION 1..111: note = Description of Artificial Sequence: Synthetic polypeptide
EVQLVESGGGLVQPGGSLRLSCAASRFMISPYHMHWVRQAPGKGLEWVSDINPAGTTDYAESVKGRFTISRDNAKNTLYLQMNSLRAEDTAVYYCDSYGYRGQGTLVTVSS

SEQ ID NO: 486 - protein, 111 aa, synthetic construct
  REGION 1..111: note = Description of Artificial Sequence: Synthetic polypeptide
EVQLVESGGGLVQPGGSLRLSCAASRFMISEYHMHWVRQAPGKGLEWVSDINPAGQTDYAESVKGRFTISRDNAKNTLYLQMNSLRAEDTAVYYCDSYGYRGQGTLVTVSS

SEQ ID NO: 487 - protein, 111 aa, synthetic construct
  REGION 1..111: note = Description of Artificial Sequence: Synthetic polypeptide
EVQLVESGGGLVQPGGSLRLSCAASRFMISEYHMHWVRQAPGKGLEWVSDINPAGTTDYAEYVKGRFTISRDNAKNTLYLQMNSLRAEDTAVYYCDSYGYRGQGTLVTVSS

SEQ ID NO: 488 - protein, 111 aa, synthetic construct
  REGION 1..111: note = Description of Artificial Sequence: Synthetic polypeptide
EVQLVESGGGLVQPGGSLTLSCAASRFMISEYHMHWVRQAPGKGLEWVSDINPAGTTDYAESVKGRFTISRDNAKNTLYLQMNSLKPEDTAVYYCDSYGYRGQGTQVTVSS

SEQ ID NO: 489 - protein, 111 aa, synthetic construct
  REGION 1..111: note = Description of Artificial Sequence: Synthetic polypeptide
EVQLVESGGGLVQPGGSLTLSCAASRFMISEYHMHWVRQAPGKGLEWVSTINPAGTTDYAESVKGRFTISRDNAKNTLYLQMNSLKPEDTAVYYCDSYGYRGQGTQVTVSS

SEQ ID NO: 490 - protein, 10 aa, synthetic construct
  REGION 1..10: note = Description of Artificial Sequence: Synthetic peptide
GRTFSVRGMA

SEQ ID NO: 491 - protein, 10 aa, synthetic construct
  REGION 1..10: note = Description of Artificial Sequence: Synthetic peptide
GSIPSIEQMG

SEQ ID NO: 492 - protein, 10 aa, synthetic construct
  REGION 1..10: note = Description of Artificial Sequence: Synthetic peptide
GTTYTFDLMS

SEQ ID NO: 493 - protein, 10 aa, synthetic construct
  REGION 1..10: note = Description of Artificial Sequence: Synthetic peptide
GSTSNINNMR

SEQ ID NO: 494 - protein, 10 aa, synthetic construct
  REGION 1..10: note = Description of Artificial Sequence: Synthetic peptide
GSTFGINAMG

SEQ ID NO: 495 - protein, 10 aa, synthetic construct
  REGION 1..10: note = Description of Artificial Sequence: Synthetic peptide
ISAFRLMSVR

SEQ ID NO: 496 - protein, 10 aa, synthetic construct
  REGION 1..10: note = Description of Artificial Sequence: Synthetic peptide
GRPFSINTMG

SEQ ID NO: 497 - protein, 10 aa, synthetic construct
  REGION 1..10: note = Description of Artificial Sequence: Synthetic peptide
GSDFTEDAMA

SEQ ID NO: 498 - protein, 10 aa, synthetic construct
  REGION 1..10: note = Description of Artificial Sequence: Synthetic peptide
GSDFTEDAMA

SEQ ID NO: 499 - protein, 10 aa, synthetic construct
  REGION 1..10: note = Description of Artificial Sequence: Synthetic peptide
GFTFSSFGMS

SEQ ID NO: 500 - protein, 10 aa, synthetic construct
  REGION 1..10: note = Description of Artificial Sequence: Synthetic peptide
GLTYSIVAVG

SEQ ID NO: 501 - protein, 10 aa, synthetic construct
  REGION 1..10: note = Description of Artificial Sequence: Synthetic peptide
GLTFGVYGME

SEQ ID NO: 502 - protein, 9 aa, synthetic construct
  REGION 1..9: note = Description of Artificial Sequence: Synthetic peptide
TTSSINSMS

SEQ ID NO: 503 - protein, 10 aa, synthetic construct
  REGION 1..10: note = Description of Artificial Sequence: Synthetic peptide
GRTLSRYAMG

SEQ ID NO: 504 - protein, 10 aa, synthetic construct
  REGION 1..10: note = Description of Artificial Sequence: Synthetic peptide
GSIFSPNAMI

SEQ ID NO: 505 - protein, 10 aa, synthetic construct
  REGION 1..10: note = Description of Artificial Sequence: Synthetic peptide
GATSAITNLG

SEQ ID NO: 506 - protein, 10 aa, synthetic construct
  REGION 1..10: note = Description of Artificial Sequence: Synthetic peptide
GSTFRIRVMR

SEQ ID NO: 507 - protein, 10 aa, synthetic construct
  REGION 1..10: note = Description of Artificial Sequence: Synthetic peptide
GDTSKFKAVG

SEQ ID NO: 508 - protein, 10 aa, synthetic construct
  REGION 1..10: note = Description of Artificial Sequence: Synthetic peptide
GSTFGNKPMG

SEQ ID NO: 509 - protein, 10 aa, synthetic construct
  REGION 1..10: note = Description of Artificial Sequence: Synthetic peptide
GSTSSINTMY

SEQ ID NO: 510 - protein, 10 aa, synthetic construct
  REGION 1..10: note = Description of Artificial Sequence: Synthetic peptide
GRTDRITTMG

SEQ ID NO: 511 - protein, 10 aa, synthetic construct
  REGION 1..10: note = Description of Artificial Sequence: Synthetic peptide
GRTIGINDMA

SEQ ID NO: 512 - protein, 9 aa, synthetic construct
  REGION 1..9: note = Description of Artificial Sequence: Synthetic peptide
AIGSINSMS

SEQ ID NO: 513 - protein, 10 aa, synthetic construct
  REGION 1..10: note = Description of Artificial Sequence: Synthetic peptide
GSTSSINTMY

SEQ ID NO: 514 - protein, 9 aa, synthetic construct
  REGION 1..9: note = Description of Artificial Sequence: Synthetic peptide
TTFSINSMS

SEQ ID NO: 515 - protein, 10 aa, synthetic construct
  REGION 1..10: note = Description of Artificial Sequence: Synthetic peptide
GSTFSIRAMR

SEQ ID NO: 516 - protein, 10 aa, synthetic construct
  REGION 1..10: note = Description of Artificial Sequence: Synthetic peptide
GRTSTIDTMY

SEQ ID NO: 517 - protein, 10 aa, synthetic construct
  REGION 1..10: note = Description of Artificial Sequence: Synthetic peptide
GSTSSINTMY

SEQ ID NO: 518 - protein, 10 aa, synthetic construct
  REGION 1..10: note = Description of Artificial Sequence: Synthetic peptide
GGDWSANFMY

SEQ ID NO: 519 - protein, 10 aa, synthetic construct
  REGION 1..10: note = Description of Artificial Sequence: Synthetic peptide
GGDWSANFMY

SEQ ID NO: 520 - protein, 10 aa, synthetic construct
  REGION 1..10: note = Description of Artificial Sequence: Synthetic peptide
GSTSSINTMY

SEQ ID NO: 521 - protein, 10 aa, synthetic construct
  REGION 1..10: note = Description of Artificial Sequence: Synthetic peptide
GSTSSINTMY

SEQ ID NO: 522 - protein, 10 aa, synthetic construct
  REGION 1..10: note = Description of Artificial Sequence: Synthetic peptide
GSTSSINTMY

SEQ ID NO: 523 - protein, 10 aa, synthetic construct
  REGION 1..10: note = Description of Artificial Sequence: Synthetic peptide
GSTFSIRAMR

SEQ ID NO: 524 - protein, 10 aa, synthetic construct
  REGION 1..10: note = Description of Artificial Sequence: Synthetic peptide
GSTFSIRAMR

SEQ ID NO: 525 - protein, 10 aa, synthetic construct
  REGION 1..10: note = Description of Artificial Sequence: Synthetic peptide
GSTFSIRAMR

SEQ ID NO: 526 - protein, 10 aa, synthetic construct
  REGION 1..10: note = Description of Artificial Sequence: Synthetic peptide
GRTSTIDTMY

SEQ ID NO: 527 - protein, 10 aa, synthetic construct
  REGION 1..10: note = Description of Artificial Sequence: Synthetic peptide
GRTSTIDTMY

SEQ ID NO: 528 - protein, 10 aa, synthetic construct
  REGION 1..10: note = Description of Artificial Sequence: Synthetic peptide
GRTSTIDTMY

SEQ ID NO: 529 - protein, 19 aa, synthetic construct
  REGION 1..19: note = Description of Artificial Sequence: Synthetic peptide
TMNPDGFPNYADAVKGRFT

SEQ ID NO: 530 - protein, 19 aa, synthetic construct
  REGION 1..19: note = Description of Artificial Sequence: Synthetic peptide
ALTSGGRANYADSVKGRFT

SEQ ID NO: 531 - protein, 19 aa, synthetic construct
  REGION 1..19: note = Description of Artificial Sequence: Synthetic peptide
SISSDGRTSYADSVRGRFT

SEQ ID NO: 532 - protein, 19 aa, synthetic construct
  REGION 1..19: note = Description of Artificial Sequence: Synthetic peptide
VITRGGYAIYLDAVKGRFT

SEQ ID NO: 533 - protein, 19 aa, synthetic construct
  REGION 1..19: note = Description of Artificial Sequence: Synthetic peptide
VISRGGSTNYADSVKGRFT

SEQ ID NO: 534 - protein, 19 aa, synthetic construct
  REGION 1..19: note = Description of Artificial Sequence: Synthetic peptide
TIDQLGRTNYADSVKGRFA

SEQ ID NO: 535 - protein, 19 aa, synthetic construct
  REGION 1..19: note = Description of Artificial Sequence: Synthetic peptide
SISSSGDFTYTDSVKGRFT

SEQ ID NO: 536 - protein, 20 aa, synthetic construct
  REGION 1..20: note = Description of Artificial Sequence: Synthetic peptide
FVSKDGKRILYLDSVRGRFT

SEQ ID NO: 537 - protein, 20 aa, synthetic construct
  REGION 1..20: note = Description of Artificial Sequence: Synthetic peptide
FVSKDGKRILYLDSVRGRFT

SEQ ID NO: 538 - protein, 20 aa, synthetic construct
  REGION 1..20: note = Description of Artificial Sequence: Synthetic peptide
SISGSGSDTLYADSVKGRFT

SEQ ID NO: 539 - protein, 19 aa, synthetic construct
  REGION 1..19: note = Description of Artificial Sequence: Synthetic peptide
DISPVGNTNYADSVKGRFT

SEQ ID NO: 540 - protein, 19 aa, synthetic construct
  REGION 1..19: note = Description of Artificial Sequence: Synthetic peptide
SHTSTGYVYYRDSVKGRFT

SEQ ID NO: 541 - protein, 19 aa, synthetic construct
  REGION 1..19: note = Description of Artificial Sequence: Synthetic peptide
VITDRGSTSYADSVKGRFT

SEQ ID NO: 542 - protein, 20 aa, synthetic construct
  REGION 1..20: note = Description of Artificial Sequence: Synthetic peptide
AISRSGGTTRYSDSVKGRFT

SEQ ID NO: 543 - protein, 19 aa, synthetic construct
  REGION 1..19: note = Description of Artificial Sequence: Synthetic peptide
SINSSGSTNYGDSVKGRFT

SEQ ID NO: 544 - protein, 20 aa, synthetic construct
  REGION 1..20: note = Description of Artificial Sequence: Synthetic peptide
RISVREDKEDYEDSVKGRFT

SEQ ID NO: 545 - protein, 18 aa, synthetic construct
  REGION 1..18: note = Description of Artificial Sequence: Synthetic peptide
VISGSSTYYADSVKGRFT

SEQ ID NO: 546 - protein, 19 aa, synthetic construct
  REGION 1..19: note = Description of Artificial Sequence: Synthetic peptide
WINNSGVGNTAESVKGRFT

SEQ ID NO: 547 - protein, 20 aa, synthetic construct
  REGION 1..20: note = Description of Artificial Sequence: Synthetic peptide
VISSDGGSTRYAALVKGRFT

SEQ ID NO: 548 - protein, 19 aa, synthetic construct
  REGION 1..19: note = Description of Artificial Sequence: Synthetic peptide
FISSGGSTNVRDSVKGRFS

SEQ ID NO: 549 - protein, 19 aa, synthetic construct
  REGION 1..19: note = Description of Artificial Sequence: Synthetic peptide
TISNRGTSNYANSVKGRFT

SEQ ID NO: 550 - protein, 19 aa, synthetic construct
  REGION 1..19: note = Description of Artificial Sequence: Synthetic peptide
TITKGGTTDYADSVDGRFT

SEQ ID NO: 551 - protein, 19 aa, synthetic construct
  REGION 1..19: note = Description of Artificial Sequence: Synthetic peptide
VITDRGSTSYADSVKGRFT

SEQ ID NO: 552 - protein, 19 aa, synthetic construct
  REGION 1..19: note = Description of Artificial Sequence: Synthetic peptide
TINRGGSTNVRDSVKGRFS

SEQ ID NO: 553 - protein, 19 aa, synthetic construct
  REGION 1..19: note = Description of Artificial Sequence: Synthetic peptide
VITNRGTTSYADSVKGRFT

SEQ ID NO: 554 - protein, 18 aa, synthetic construct
  REGION 1..18: note = Description of Artificial Sequence: Synthetic peptide
VIYGSSTYYADAVKGRFT

SEQ ID NO: 555 - protein, 19 aa, synthetic construct
  REGION 1..19: note = Description of Artificial Sequence: Synthetic peptide
YVTSRGTSNVADSVKGRFT

SEQ ID NO: 556 - protein, 19 aa, synthetic construct
  REGION 1..19: note = Description of Artificial Sequence: Synthetic peptide
FISSGGSTNVRDSVKGRFS

SEQ ID NO: 557 - protein, 19 aa, synthetic construct
  REGION 1..19: note = Description of Artificial Sequence: Synthetic peptide
RISGRGVVDYVESVKGRFT

SEQ ID NO: 558 - protein, 19 aa, synthetic construct
  REGION 1..19: note = Description of Artificial Sequence: Synthetic peptide
RISGRGVVDYVESVKGRFT

SEQ ID NO: 559 - protein, 19 aa, synthetic construct
  REGION 1..19: note = Description of Artificial Sequence: Synthetic peptide
FISSGGSTNVRDSVKGRFT

SEQ ID NO: 560 - protein, 19 aa, synthetic construct
  REGION 1..19: note = Description of Artificial Sequence: Synthetic peptide
FISSGGSTNVRDSVKGRFT

SEQ ID NO: 561 - protein, 19 aa, synthetic construct
  REGION 1..19: note = Description of Artificial Sequence: Synthetic peptide
FISSGGSTNVRDSVKGRFT

SEQ ID NO: 562 - protein, 18 aa, synthetic construct
  REGION 1..18: note = Description of Artificial Sequence: Synthetic peptide
VIYGSSTYYADAVKGRFT

SEQ ID NO: 563 - protein, 18 aa, synthetic construct
  REGION 1..18: note = Description of Artificial Sequence: Synthetic peptide
VIYGSSTYYADAVKGRFT

SEQ ID NO: 564 - protein, 18 aa, synthetic construct
  REGION 1..18: note = Description of Artificial Sequence: Synthetic peptide
VIYGSSTYYADAVKGRFT

SEQ ID NO: 565 - protein, 19 aa, synthetic construct
  REGION 1..19: note = Description of Artificial Sequence: Synthetic peptide
YVTSRGTSNVADSVKGRFT

SEQ ID NO: 566 - protein, 19 aa, synthetic construct
  REGION 1..19: note = Description of Artificial Sequence: Synthetic peptide
YVTSRGTSNVADSVKGRFT

SEQ ID NO: 567 - protein, 19 aa, synthetic construct
  REGION 1..19: note = Description of Artificial Sequence: Synthetic peptide
YVTSRGTSNVADSVKGRFT

SEQ ID NO: 568 - skipped

SEQ ID NO: 569 - protein, 15 aa, synthetic construct
  REGION 1..15: note = Description of Artificial Sequence: Synthetic peptide
GRFKGDYAQRSGMDY

SEQ ID NO: 570 - protein, 8 aa, synthetic construct
  REGION 1..8: note = Description of Artificial Sequence: Synthetic peptide
QRSGVRAF

SEQ ID NO: 571 - protein, 15 aa, synthetic construct
  REGION 1..15: note = Description of Artificial Sequence: Synthetic peptide
DRVEGTSGGPQLRDY

SEQ ID NO: 572 - protein, 8 aa, synthetic construct
  REGION 1..8: note = Description of Artificial Sequence: Synthetic peptide
RTYTRHDY

SEQ ID NO: 573 - protein, 14 aa, synthetic construct
  REGION 1..14: note = Description of Artificial Sequence: Synthetic peptide
GGGPLGSRWLRGRH

SEQ ID NO: 574 - protein, 11 aa, synthetic construct
  REGION 1..11: note = Description of Artificial Sequence: Synthetic peptide
RRTYLPRRFGS

SEQ ID NO: 575 - protein, 8 aa, synthetic construct
  REGION 1..8: note = Description of Artificial Sequence: Synthetic peptide
APGAARNY

SEQ ID NO: 576 - protein, 8 aa, synthetic construct
  REGION 1..8: note = Description of Artificial Sequence: Synthetic peptide
APGAARNV

SEQ ID NO: 577 - protein, 8 aa, synthetic construct
  REGION 1..8: note = Description of Artificial Sequence: Synthetic peptide
GGSLSRSS

SEQ ID NO: 578 - protein, 16 aa, synthetic construct
  REGION 1..16: note = Description of Artificial Sequence: Synthetic peptide
VRGWLDERPGPGPIVY

SEQ ID NO: 579 - protein, 7 aa, synthetic construct
  REGION 1..7: note = Description of Artificial Sequence: Synthetic peptide
NRGSYEY

SEQ ID NO: 580 - protein, 7 aa, synthetic construct
  REGION 1..7: note = Description of Artificial Sequence: Synthetic peptide
IADWRGY

SEQ ID NO: 581 - protein, 11 aa, synthetic construct
  REGION 1..11: note = Description of Artificial Sequence: Synthetic peptide
RRRGWGRTLEY

SEQ ID NO: 582 - protein, 9 aa, synthetic construct
  REGION 1..9: note = Description of Artificial Sequence: Synthetic peptide
SDFRRGTQY

SEQ ID NO: 583 - protein, 10 aa, synthetic construct
  REGION 1..10: note = Description of Artificial Sequence: Synthetic peptide
QRWGRGPGTT

SEQ ID NO: 584 - protein, 9 aa, synthetic construct
  REGION 1..9: note = Description of Artificial Sequence: Synthetic peptide
DDSGIARDY

SEQ ID NO: 585 - protein, 10 aa, synthetic construct
  REGION 1..10: note = Description of Artificial Sequence: Synthetic peptide
YRRFGINKNY

SEQ ID NO: 586 - protein, 13 aa, synthetic construct
  REGION 1..13: note = Description of Artificial Sequence: Synthetic peptide
LRTYYLNDPVVFS

SEQ ID NO: 587 - protein, 11 aa, synthetic construct
  REGION 1..11: note = Description of Artificial Sequence: Synthetic peptide
YIPLRGTLHDY

SEQ ID NO: 588 - protein, 7 aa, synthetic construct
  REGION 1..7: note = Description of Artificial Sequence: Synthetic peptide
RKWGRNY

SEQ ID NO: 589 - protein, 11 aa, synthetic construct
  REGION 1..11: note = Description of Artificial Sequence: Synthetic peptide
KRREWAKDFEY

SEQ ID NO: 590 - protein, 7 aa, synthetic construct
  REGION 1..7: note = Description of Artificial Sequence: Synthetic peptide
IADWRGY

SEQ ID NO: 591 - protein, 11 aa, synthetic construct
  REGION 1..11: note = Description of Artificial Sequence: Synthetic peptide
YIPYGGTLHDF

SEQ ID NO: 592 - protein, 7 aa, synthetic construct
  REGION 1..7: note = Description of Artificial Sequence: Synthetic peptide
IADWRGY

SEQ ID NO: 593 - protein, 9 aa, synthetic construct
  REGION 1..9: note = Description of Artificial Sequence: Synthetic peptide
DTIGTARDY

SEQ ID NO: 594 - protein, 9 aa, synthetic construct
  REGION 1..9: note = Description of Artificial Sequence: Synthetic peptide
RTTSYPVDF

SEQ ID NO: 595 - protein, 11 aa, synthetic construct
  REGION 1..11: note = Description of Artificial Sequence: Synthetic peptide
YIPYGGTLHDF

SEQ ID NO: 596-597 - skipped (2 entries)

SEQ ID NO: 598 - protein, 11 aa, synthetic construct
  REGION 1..11: note = Description of Artificial Sequence: Synthetic peptide
YIPYGGTLHDF

SEQ ID NO: 599 - protein, 11 aa, synthetic construct
  REGION 1..11: note = Description of Artificial Sequence: Synthetic peptide
YIPYGGTLHDF

SEQ ID NO: 600 - protein, 11 aa, synthetic construct
  REGION 1..11: note = Description of Artificial Sequence: Synthetic peptide
YIPYGGTLHDF

SEQ ID NO: 601 - protein, 9 aa, synthetic construct
  REGION 1..9: note = Description of Artificial Sequence: Synthetic peptide
DTIGTARDY

SEQ ID NO: 602 - protein, 9 aa, synthetic construct
  REGION 1..9: note = Description of Artificial Sequence: Synthetic peptide
DTIGTARDY

SEQ ID NO: 603 - protein, 9 aa, synthetic construct
  REGION 1..9: note = Description of Artificial Sequence: Synthetic peptide
DTIGTARDY

SEQ ID NO: 604 - protein, 9 aa, synthetic construct
  REGION 1..9: note = Description of Artificial Sequence: Synthetic peptide
RTTSYPVDF

SEQ ID NO: 605 - protein, 9 aa, synthetic construct
  REGION 1..9: note = Description of Artificial Sequence: Synthetic peptide
RTTSYPVDF

SEQ ID NO: 606 - protein, 9 aa, synthetic construct
  REGION 1..9: note = Description of Artificial Sequence: Synthetic peptide
RTTSYPVDF

SEQ ID NO: 607 - protein, 110 aa, synthetic construct
  REGION 1..110: note = Description of Artificial Sequence: Synthetic polypeptide
QVQLVESGGGLVQPGGSLRLSCAASGRTFSVRGMAWYRQAGNNRALVATMNPDGFPNYADAVKGRFTISWDIAENTVYLQMNSLNSEDTTVYYCNSGPYWGQGTQVTVSS

SEQ ID NO: 608 - protein, 123 aa, synthetic construct
  REGION 1..123: note = Description of Artificial Sequence: Synthetic polypeptide
QVQLVESGGGLVQAGGSLRLSCAASGSIPSIEQMGWYRQAPGKQRELVAALTSGGRANYADSVKGRFTISGDNVRNMVYLQMNSLKPEDTAIYYCSAGRFKGDYAQRSGMDYWGKGTLVTVSS

SEQ ID NO: 609 - protein, 116 aa, synthetic construct
  REGION 1..116: note = Description of Artificial Sequence: Synthetic polypeptide
QVQLVESGGGLVQAGGSLRLSCAFSGTTYTFDLMSWYRQAPGKQRTVVASISSDGRTSYADSVRGRFTISGENGKNTVYLQMNSLKLEDTAVYYCLGQRSGVRAFWGQGTQVTVSS

SEQ ID NO: 610 - protein, 123 aa, synthetic construct
  REGION 1..123: note = Description of Artificial Sequence: Synthetic polypeptide
QVQLVESGGGLVQAGGSLRLSCVASGSTSNINNMRWYRQAPGKERELVAVITRGGYAIYLDAVKGRFTISRDNANNAIYLEMNSLKPEDTAVYVCNADRVEGTSGGPQLRDYFGQGTQVTVSS

SEQ ID NO: 611 - protein, 116 aa, synthetic construct
  REGION 1..116: note = Description of Artificial Sequence: Synthetic polypeptide
QVQLVESGGGLVQAGGSLRLSCAASGSTFGINAMGWYRQAPGKQRELVAVISRGGSTNYADSVKGRFTISRDNAENTVSLQMNTLKPEDTAVYFCNARTYTRHDYWGQGTQVTVSS

SEQ ID NO: 612 - protein, 122 aa, synthetic construct
  REGION 1..122: note = Description of Artificial Sequence: Synthetic polypeptide
QVRLVESGGGLVQAGGSLRLSCAASISAFRLMSVRWYRQDPSKQREWVATIDQLGRTNYADSVKGRFAISKDSTRNTVYLQMNMLRPEDTAVYYCNAGGGPLGSRWLRGRHWGQGTQVTVSS

SEQ ID NO: 613 - protein, 119 aa, synthetic construct
  REGION 1..119: note = Description of Artificial Sequence: Synthetic polypeptide
QVRLVESGGGLVQAGESLRLSCAASGRPFSINTMGWYRQAPGKQRELVASISSSGDFTYTDSVKGRFTISRDNAKNTVYLQMNSLKPEDTAVYYCNARRTYLPRRFGSWGQGTQVTVSS

SEQ ID NO: 614 - protein, 117 aa, synthetic construct
  REGION 1..117: note = Description of Artificial Sequence: Synthetic polypeptide
QVQPVESGGGLVQPGGSLRLSCVVSGSDFTEDAMAWYRQASGKERESVAFVSKDGKRILYLDSVRGRFTISRDIDKKTVYLQMDNLKPEDTGVYYCNSAPGAARNYWGQGTQVTVSS

SEQ ID NO: 615 - protein, 117 aa, synthetic construct
  REGION 1..117: note = Description of Artificial Sequence: Synthetic polypeptide
QVQPVESGGGLVQPGGSLRLSCVVSGSDFTEDAMAWYRQASGKERESVAFVSKDGKRILYLDSVRGRFTISRDIYKKTVYLQMDNLKPEDTGVYYCNSAPGAARNVWGQGTQVTVSS

SEQ ID NO: 616 - protein, 115 aa, synthetic construct [sequence omitted]

SEQ ID NO: 617 - protein, 124 aa, synthetic construct
  REGION 1..124: note = Description of Artificial Sequence: Synthetic polypeptide
QVQIVESGGGLVQAGGSLRLSCVASGLTYSIVAVGWYRQAPGKEREMVADISPVGNTNYADSVKGRFTISKENAKNTVYLQMNSLKPEDTAVYYCHIVRGWLDERPGPGPIVYWGQGTQVTVSS

SEQ ID NO: 618 - protein, 115 aa, synthetic construct
  REGION 1..115: note = Description of Artificial Sequence: Synthetic polypeptide
QVQLVESGGGLVQTGGSLRLSCAASGLTFGVYGMEWFRQAPGKQREWVASHTSTGYVYYRDSVKGRFTISRDNAKSTVYLQMNSLKPEDTAIYYCKANRGSYEYWGQGTQVTVSS

SEQ ID NO: 619 - protein, 114 aa, synthetic construct
  REGION 1..114: note = Description of Artificial Sequence: Synthetic polypeptide
QVQLVESGGGLVQAGGSLRLSCAASTTSSINSMSWYRQAQGKQREPVAVITDRGSTSYADSVKGRFTISRDNAKNTVYLQMNSLKPEDTAIYTCHVIADWRGYWGQGTQVTVSS

SEQ ID NO: 620 - protein, 120 aa, synthetic construct
  REGION 1..120: note = Description of Artificial Sequence: Synthetic polypeptide
QVQLVESGGGLVQAGGSLRLSCAASGRTLSRYAMGWFRQAPGKERQFVAAISRSGGTTRYSDSVKGRFTISRDNAANTFYLQMNNLRPDDTAVYYCNVRRRGWGRTLEYWGQGTQVTVSS

SEQ ID NO: 621 - protein, 117 aa, synthetic construct
  REGION 1..117: note = Description of Artificial Sequence: Synthetic polypeptide
QVQLGESGGGLVQAGGSLRLSCAASGSIFSPNAMIWHRQAPGKQREPVASINSSGSTNYGDSVKGRFTVSRDIVKNTMYLQMNSLKPEDTAVYYCSYSDFRRGTQYWGQGTQVTVSS

SEQ ID NO: 622 - protein, 119 aa, synthetic construct
  REGION 1..119: note = Description of Artificial Sequence: Synthetic polypeptide
QVQLVESGGGLVPSGGSLRLSCAASGATSAITNLGWYRRAPGQVREMVARISVREDKEDYEDSVKGRFTISRDNTQNLVYLQMNNLQPHDTAIYYCGAQRWGRGPGTTWGQGTQVTVSS

SEQ ID NO: 623 - protein, 116 aa, synthetic construct
  REGION 1..116: note = Description of Artificial Sequence: Synthetic polypeptide
QVQLVESGGGLVQAGGSLRLSCAASGSTFRIRVMRWYRQAPGTERDLVAVISGSSTYYADSVKGRFTISRDNAKNTLYLQMNNLKPEDTAVYYCNADDSGIARDYWGQGTQVTVSS

SEQ ID NO: 624 - protein, 118 aa, synthetic construct
  REGION 1..118: note = Description of Artificial Sequence: Synthetic polypeptide
QVQLVESGGGLVQAGESRRLSCAVSGDTSKFKAVGWYRQAPGAQRELLAWINNSGVGNTAESVKGRFTISRDNAKNTVYLQMNRLTPEDTDVYYCRFYRRFGINKNYWGQGTQVTVSS

SEQ ID NO: 625 - protein, 122 aa, synthetic construct
  REGION 1..122: note = Description of Artificial Sequence: Synthetic polypeptide
QVQLVESGGGLVQAGGSLRLSCAASGSTFGNKPMGWYRQAPGKQRELVAVISSDGGSTRYAALVKGRFTISRDNAKNTVYLQMESLVAEDTAVYYCNALRTYYLNDPVVFSWGQGTQVTVSS

SEQ ID NO: 626 - protein, 119 aa, synthetic construct
  REGION 1..119: note = Description of Artificial Sequence: Synthetic polypeptide
QVQLVESGGGLVQAGGSLRLSCAASGSTSSINTMYWYRQAPGKERELVAFISSGGSTNVRDSVKGRFSVSRDSAKNIVYLQMNSLTPEDTAVYYCNTYIPLRGTLHDYWGQGTQVTVSS

SEQ ID NO: 627 - protein, 115 aa, synthetic construct
  REGION 1..115: note = Description of Artificial Sequence: Synthetic polypeptide
QVQLVESGGGLVQAGGSLRLSCVASGRTDRITTMGWYRQAPGKQRELVATISNRGTSNYANSVKGRFTISRDNAKNTVYLQMNSLKPEDTAVYYCNARKWGRNYWGQGTQVTVSS

SEQ ID NO: 628 - protein, 119 aa, synthetic construct
  REGION 1..119: note = Description of Artificial Sequence: Synthetic polypeptide
QVQLVESGGGLVQARGSLRLSCTASGRTIGINDMAWYRQAPGNQRELVATITKGGTTDYADSVDGRFTISRDNAKNTVYLQMNSLKPEDTAVYYCNTKRREWAKDFEYWGQGTQVTVSS

SEQ ID NO: 629 - protein, 114 aa, synthetic construct
  REGION 1..114: note = Description of Artificial Sequence: Synthetic polypeptide
QVQLVESGGGLVQAGGSLRLSCAASAIGSINSMSWYRQAPGKQREPVAVITDRGSTSYADSVKGRFTISRDNAKNTVYLQMNSLKPEDTAIYTCHVIADWRGYWGQGTQVTVSS

SEQ ID NO: 630 - protein, 119 aa, synthetic construct
  REGION 1..119: note = Description of Artificial Sequence: Synthetic polypeptide
QVQLVESGGGLVQAGGSLRLSCAASGSTSSINTMYWFRQAPGEERELVATINRGGSTNVRDSVKGRFSVSRDSAKNIVYLQMNRLKPEDTAVYYCNTYIPYGGTLHDFWGQGTQVTVSS

SEQ ID NO: 631 - protein, 114 aa, synthetic construct
  REGION 1..114: note = Description of Artificial Sequence: Synthetic polypeptide
QVQLVESGGGLVQAGGSLRLSCTTSTTFSINSMSWYRQAPGNQREPVAVITNRGTTSYADSVKGRFTISRDNARNTVYLQMDSLKPEDTAIYTCHVIADWRGYWGQGTQVTVSS

SEQ ID NO: 632 - protein, 116 aa, synthetic construct
  REGION 1..116: note = Description of Artificial Sequence: Synthetic polypeptide
QVQLVESGGGLVQAGGSLTLSCAASGSTFSIRAMRWYRQAPGTERDLVAVIYGSSTYYADAVKGRFTISRDNAKNTLYLQMNNLKPEDTAVYYCNADTIGTARDYWGQGTQVTVSS

SEQ ID NO: 633 - protein, 117 aa, synthetic construct
  REGION 1..117: note = Description of Artificial Sequence: Synthetic polypeptide
QVQLVESGGGLVQAGGSLRLSCVASGRTSTIDTMYWHRQAPGNERELVAYVTSRGTSNVADSVKGRFTISRDNAKNTAYLQMNSLKPEDTAVYYCSVRTTSYPVDFWGQGTQVTVSS

SEQ ID NO: 634 - protein, 119 aa, synthetic construct
  REGION 1..119: note = Description of Artificial Sequence: Synthetic polypeptide
QVQLVESGGGLVQAGGSLRLSCAASGSTSSINTMYWYRQAPGKERELVAFISSGGSTNVRDSVKGRFSVSRDSAKNIVYLQMNSLKPEDTAVYYCNTYIPYGGTLHDFWGQGTQVTVSS

SEQ ID NO: 635 - protein, 111 aa, synthetic construct
  REGION 1..111: note = Description of Artificial Sequence: Synthetic polypeptide
QVQLVESGGGLVQPGGSLRLSCAASGGDWSANFMYWYRQAPGKQRELVARISGRGVVDYVESVKGRFTISRDNAKNTVYLQMNSLKPEDTAVYYCAVASYWGQGTQVTVSS

SEQ ID NO: 636 - protein, 111 aa, synthetic construct
  REGION 1..111: note = Description of Artificial Sequence: Synthetic polypeptide
EVQLVESGGGLVQPGGSLRLSCAASGGDWSANFMYWYRQAPGKQRELVARISGRGVVDYVESVKGRFTISRDNSKNTLYLQMNSLRAEDTAVYYCAVASYWGQGTLVTVSS

SEQ ID NO: 637 - protein, 111 aa, synthetic construct
  REGION 1..111: note = Description of Artificial Sequence: Synthetic polypeptide
EVQLVESGGGLVQPGGSLRLSCAASGGDWSANFMYWVRQAPGKGLEWVSRISGRGVVDYVESVKGRFTISRDNSKNTLYLQMNSLRAEDTAVYYCAVASYWGQGTLVTVSS

SEQ ID NO: 638 - protein, 119 aa, synthetic construct
  REGION 1..119: note = Description of Artificial Sequence: Synthetic polypeptide
EVQLVESGGGLVQAGGSLRLSCAASGSTSSINTMYWYRQAPGKERELVAFISSGGSTNVRDSVKGRFTISRDNSKNTLYLQMNSLRAEDTAVYYCNTYIPYGGTLHDFWGQGTLVTVSS

SEQ ID NO: 639 - protein, 119 aa, synthetic construct
  REGION 1..119: note = Description of Artificial Sequence: Synthetic polypeptide
EVQLVESGGGLVQPGGSLRLSCAASGSTSSINTMYWYRQAPGKERELVAFISSGGSTNVRDSVKGRFTISRDNSKNTLYLQMNSLRAEDTAVYYCNTYIPYGGTLHDFWGQGTLVTVSS

SEQ ID NO: 640 - protein, 119 aa, synthetic construct
  REGION 1..119: note = Description of Artificial Sequence: Synthetic polypeptide
EVQLVESGGGLVQPGGSLRLSCAASGSTSSINTMYWVRQAPGKGLEWVSFISSGGSTNVRDSVKGRFTISRDNSKNTLYLQMNSLRAEDTAVYYCNTYIPYGGTLHDFWGQGTLVTVSS

SEQ ID NO: 641 - protein, 118 aa, synthetic construct
  REGION 1..118: note = Description of Artificial Sequence: Synthetic polypeptide
QVQLVESGGGVVQAGGSLRLSCAASGSTFSIRAMRWYRQAPGTERDLVAVIYGSSTYYADAVKGRFTISRDNSKNTLYLQMNSLRAEDTAVYYCNADTIGTARDYWGQGTLVTVSSGG

SEQ ID NO: 642 - protein, 118 aa, synthetic construct
  REGION 1..118: note = Description of Artificial Sequence: Synthetic polypeptide
QVQLVESGGGVVQPGGSLRLSCAASGSTFSIRAMRWYRQAPGKERELVAVIYGSSTYYADAVKGRFTISRDNSKNTLYLQMNSLRAEDTAVYYCNADTIGTARDYWGQGTLVTVSSGG

SEQ ID NO: 643 - protein, 118 aa, synthetic construct
  REGION 1..118: note = Description of Artificial Sequence: Synthetic polypeptide
QVQLVESGGGVVQPGGSLRLSCAASGSTFSIRAMRWVRQAPGKGLEWVSVIYGSSTYYADAVKGRFTISRDNSKNTLYLQMNSLRAEDTAVYYCNADTIGTARDYWGQGTLVTVSSGG

SEQ ID NO: 644 - protein, 116 aa, synthetic construct
  REGION 1..116: note = Description of Artificial Sequence: Synthetic polypeptide
EVQLVESGGGLVQAGGSLRLSCVASGRTSTIDTMYWHRQAPGNERELVAYVTSRGTSNVADSVKGRFTISRDNSKNTLYLQMNSLRAEDTAVYYCSVRTTSYPVDFWGQGTLVTVS

SEQ ID NO: 645 - protein, 117 aa, synthetic construct
  REGION 1..117: note = Description of Artificial Sequence: Synthetic polypeptide
EVQLVESGGGLVQPGGSLRLSCAASGRTSTIDTMYWHRQAPGKERELVAYVTSRGTSNVADSVKGRFTISRDNSKNTLYLQMNSLRAEDTAVYYCSVRTTSYPVDFWGQGTLVTVSS

SEQ ID NO: 646 - protein, 117 aa, synthetic construct
  REGION 1..117: note = Description of Artificial Sequence: Synthetic polypeptide
EVQLVESGGGLVQPGGSLRLSCAASGRTSTIDTMYWVRQAPGKGLEWVSYVTSRGTSNVADSVKGRFTISRDNSKNTLYLQMNSLRAEDTAVYYCSVRTTSYPVDFWGQGTLVTVSS

SEQ ID NO: 647 - protein, 116 aa, synthetic construct
  REGION 1..116: note = Description of Artificial Sequence: Synthetic polypeptide
QVQLVESGGGVVQAGGSLTLSCAASGSTFSIRAMRWYRQAPGTERDLVAVIYGSSTYYADAVKGRFTISRDNSKNTLYLQMNSLRAEDTAVYYCNADTIGTARDYWGQGTLVTVSS

SEQ ID NO: 648 - protein, 116 aa, synthetic construct
  REGION 1..116: note = Description of Artificial Sequence: Synthetic polypeptide
QVQLVESGGGVVQAGGSLRLSCAASGSTFSIRAMRWYRQAPGTERDLVAVIYGSSTYYADAVKGRFTISRDNSKNTLYLQMNSLRAEDTAVYYCNADTIGTARDYWGQGTLVTVSS

SEQ ID NO: 649 - protein, 116 aa, synthetic construct
  REGION 1..116: note = Description of Artificial Sequence: Synthetic polypeptide
QVQLVESGGGVVQPGGSLRLSCAASGSTFSIRAMRWYRQAPGKERELVAVIYGSSTYYADAVKGRFTISRDNSKNTLYLQMNSLRAEDTAVYYCNADTIGTARDYWGQGTLVTVSS

SEQ ID NO: 650 - protein, 116 aa, synthetic construct
  REGION 1..116: note = Description of Artificial Sequence: Synthetic polypeptide
QVQLVESGGGVVQPGGSLRLSCAASGSTFSIRAMRWVRQAPGKGLEWVSVIYGSSTYYADAVKGRFTISRDNSKNTLYLQMNSLRAEDTAVYYCNADTIGTARDYWGQGTLVTVSS

SEQ ID NO: 651 - protein, 10 aa, synthetic construct
  REGION 1..10: note = Description of Artificial Sequence: Synthetic peptide
GSIAYIYTMD

SEQ ID NO: 652 - protein, 10 aa, synthetic construct
  REGION 1..10: note = Description of Artificial Sequence: Synthetic peptide
GRTDSWYVMG

SEQ ID NO: 653 - protein, 10 aa, synthetic construct
  REGION 1..10: note = Description of Artificial Sequence: Synthetic peptide
RTIISINAMT

SEQ ID NO: 654 - protein, 10 aa, synthetic construct
  REGION 1..10: note = Description of Artificial Sequence: Synthetic peptide
ARTLRLYAVG

SEQ ID NO: 655 - protein, 10 aa, synthetic construct
  REGION 1..10: note = Description of Artificial Sequence: Synthetic peptide
GSIAYIYTMD

SEQ ID NO: 656 - protein, 10 aa, synthetic construct
  REGION 1..10: note = Description of Artificial Sequence: Synthetic peptide
GSIAYIYTMD

SEQ ID NO: 657 - protein, 6 aa, synthetic construct
  REGION 1..6: note = Description of Artificial Sequence: Synthetic peptide
GRYQMA

SEQ ID NO: 658 - protein, 10 aa, synthetic construct
  REGION 1..10: note = Description of Artificial Sequence: Synthetic peptide
TRTLKLYAVG

SEQ ID NO: 659 - protein, 10 aa, synthetic construct
  REGION 1..10: note = Description of Artificial Sequence: Synthetic peptide
GSIAYIYTMD

SEQ ID NO: 660 - protein, 10 aa, synthetic construct
  REGION 1..10: note = Description of Artificial Sequence: Synthetic peptide
GSIAYIYTMD

SEQ ID NO: 661 - protein, 10 aa, synthetic construct
  REGION 1..10: note = Description of Artificial Sequence: Synthetic peptide
GSIAYIYTMD

SEQ ID NO: 662 - protein, 6 aa, synthetic construct
  REGION 1..6: note = Description of Artificial Sequence: Synthetic peptide
GRYQMA

SEQ ID NO: 663 - protein, 10 aa, synthetic construct
  REGION 1..10: note = Description of Artificial Sequence: Synthetic peptide
GSIVTINAMT

SEQ ID NO: 664 - protein, 10 aa, synthetic construct
  REGION 1..10: note = Description of Artificial Sequence: Synthetic peptide
RSIVSIKSMT

SEQ ID NO: 665 - protein, 10 aa, synthetic construct
  REGION 1..10: note = Description of Artificial Sequence: Synthetic peptide
GSTFRHHAMA

SEQ ID NO: 666 - protein, 10 aa, synthetic construct
  REGION 1..10: note = Description of Artificial Sequence: Synthetic peptide
GSIAYIYTMD

SEQ ID NO: 667 - protein, 10 aa, synthetic construct
  REGION 1..10: note = Description of Artificial Sequence: Synthetic peptide
GSIAYIYTMD

SEQ ID NO: 668 - protein, 10 aa, synthetic construct
  REGION 1..10: note = Description of Artificial Sequence: Synthetic peptide
VSIFSVNAVD

SEQ ID NO: 669 - protein, 10 aa, synthetic construct
  REGION 1..10: note = Description of Artificial Sequence: Synthetic peptide
GSIAYIYTMD

SEQ ID NO: 670 - protein, 6 aa, synthetic construct
  REGION 1..6: note = Description of Artificial Sequence: Synthetic peptide
GRYQLA

SEQ ID NO: 671 - protein, 6 aa, synthetic construct
  REGION 1..6: note = Description of Artificial Sequence: Synthetic peptide
GRYHMA

SEQ ID NO: 672 - protein, 10 aa, synthetic construct
  REGION 1..10: note = Description of Artificial Sequence: Synthetic peptide
GSIAYIYTMD

SEQ ID NO: 673 - protein, 10 aa, synthetic construct
  REGION 1..10: note = Description of Artificial Sequence: Synthetic peptide
GSIAYIYTMD

SEQ ID NO: 674 - protein, 6 aa, synthetic construct
  REGION 1..6: note = Description of Artificial Sequence: Synthetic peptide
GRYNMA

SEQ ID NO: 675 - protein, 6 aa, synthetic construct
  REGION 1..6: note = Description of Artificial Sequence: Synthetic peptide
GRYQMA

SEQ ID NO: 676 - protein, 6 aa, synthetic construct
  REGION 1..6: note = Description of Artificial Sequence: Synthetic peptide
GRYHLA

SEQ ID NO: 677 - protein, 10 aa, synthetic construct
  REGION 1..10: note = Description of Artificial Sequence: Synthetic peptide
GRSFSNYIMG

SEQ ID NO: 678 - protein, 10 aa, synthetic construct
  REGION 1..10: note = Description of Artificial Sequence: Synthetic peptide
GSIAYIYTMD

SEQ ID NO: 679 - protein, 6 aa, synthetic construct
  REGION 1..6: note = Description of Artificial Sequence: Synthetic peptide
GRYQMA

SEQ ID NO: 680 - protein, 10 aa, synthetic construct
  REGION 1..10: note = Description of Artificial Sequence: Synthetic peptide
GLTFSSYAMA

SEQ ID NO: 681 - protein, 10 aa, synthetic construct
  REGION 1..10: note = Description of Artificial Sequence: Synthetic peptide
GNIAYIYTMD

SEQ ID NO: 682 - protein, 10 aa, synthetic construct
  REGION 1..10: note = Description of Artificial Sequence: Synthetic peptide
GSIAYIYTMD

SEQ ID NO: 683 - protein, 10 aa, synthetic construct
  REGION 1..10: note = Description of Artificial Sequence: Synthetic peptide
GSIAYIYTMD

SEQ ID NO: 684 - protein, 10 aa, synthetic construct
  REGION 1..10: note = Description of Artificial Sequence: Synthetic peptide
GNDFVITDMH

SEQ ID NO: 685 - protein, 10 aa, synthetic construct
  REGION 1..10: note = Description of Artificial Sequence: Synthetic peptide
GAIAYIYGMG

SEQ ID NO: 686 - protein, 6 aa, synthetic construct
  REGION 1..6: note = Description of Artificial Sequence: Synthetic peptide
GRYHTA

SEQ ID NO: 687 - protein, 10 aa, synthetic construct
  REGION 1..10: note = Description of Artificial Sequence: Synthetic peptide
GNIAYIYTMN

SEQ ID NO: 688 - protein, 10 aa, synthetic construct
  REGION 1..10: note = Description of Artificial Sequence: Synthetic peptide
GNIAYIYTMG

SEQ ID NO: 689 - protein, 10 aa, synthetic construct
  REGION 1..10: note = Description of Artificial Sequence: Synthetic peptide
GSIAYIYTMD

SEQ ID NO: 690 - protein, 10 aa, synthetic construct
  REGION 1..10: note = Description of Artificial Sequence: Synthetic peptide
GRTDSWYVMG

SEQ ID NO: 691 - protein, 10 aa, synthetic construct
  REGION 1..10: note = Description of Artificial Sequence: Synthetic peptide
ARTLRLYAVG

SEQ ID NO: 692 - protein, 10 aa, synthetic construct
  REGION 1..10: note = Description of Artificial Sequence: Synthetic peptide
GSIVTINAMT

SEQ ID NO: 693 - protein, 6 aa, synthetic construct
  REGION 1..6: note = Description of Artificial Sequence: Synthetic peptide
GRYHMA

SEQ ID NO: 694 - protein, 10 aa, synthetic construct
  REGION 1..10: note = Description of Artificial Sequence: Synthetic peptide
GSTFRHHAMA

SEQ ID NO: 695 - protein, 10 aa, synthetic construct
  REGION 1..10: note = Description of Artificial Sequence: Synthetic peptide
GRSFSNYIMG

SEQ ID NO: 696 - protein, 10 aa, synthetic construct
  REGION 1..10: note = Description of Artificial Sequence: Synthetic peptide
GLTFSSYAMA

SEQ ID NO: 697 - protein, 10 aa, synthetic construct
  REGION 1..10: note = Description of Artificial Sequence: Synthetic peptide
VSIFSVNAVD

SEQ ID NO: 698 - protein, 10 aa, synthetic construct
  REGION 1..10: note = Description of Artificial Sequence: Synthetic peptide
GNDFVITDMH

SEQ ID NO: 699 - protein, 10 aa, synthetic construct
  REGION 1..10: note = Description of Artificial Sequence: Synthetic peptide
GAIAYIYGMG

SEQ ID NO: 700 - protein, 16 aa, synthetic construct
  REGION 1..16: note = Description of Artificial Sequence: Synthetic peptide
TSTRDGNVDYAESVKG

SEQ ID NO: 701 - protein, 16 aa, synthetic construct
  REGION 1..16: note = Description of Artificial Sequence: Synthetic peptide
VSWSYGNTYYADSVKG

SEQ ID NO: 702 - protein, 16 aa, synthetic construct
  REGION 1..16: note = Description of Artificial Sequence: Synthetic peptide
IITSGGETNYADSVKG

SEQ ID NO: 703 - protein, 16 aa, synthetic construct
  REGION 1..16: note = Description of Artificial Sequence: Synthetic peptide
GIGRSERTYYTDSVKG

SEQ ID NO: 704 - protein, 16 aa, synthetic construct
  REGION 1..16: note = Description of Artificial Sequence: Synthetic peptide
TSTHDGNTDYADSVKG

SEQ ID NO: 705 - protein, 16 aa, synthetic construct
  REGION 1..16: note = Description of Artificial Sequence: Synthetic peptide
TSTRDGNTDYADSVKG

SEQ ID NO: 706 - protein, 16 aa, synthetic construct
  REGION 1..16: note = Description of Artificial Sequence: Synthetic peptide
TISSGDSTWYTNSVKG

SEQ ID NO: 707 - protein, 16 aa, synthetic construct
  REGION 1..16: note = Description of Artificial Sequence: Synthetic peptide
GIGRSERIYYIDSVKG

SEQ ID NO: 708 - protein, 16 aa, synthetic construct
  REGION 1..16: note = Description of Artificial Sequence: Synthetic peptide
TSTHDGNTDYADSVKG

SEQ ID NO: 709 - protein, 16 aa, synthetic construct
  REGION 1..16: note = Description of Artificial Sequence: Synthetic peptide
TFTRDGNTDYADSVKG

SEQ ID NO: 710 - protein, 16 aa, synthetic construct
  REGION 1..16: note = Description of Artificial Sequence: Synthetic peptide
TSTHDGNTDYADSLKG

SEQ ID NO: 711 - protein, 16 aa, synthetic construct
  REGION 1..16: note = Description of Artificial Sequence: Synthetic peptide
TISSGDSTWYTNSLKG

SEQ ID NO: 712 - protein, 16 aa, synthetic construct
  REGION 1..16: note = Description of Artificial Sequence: Synthetic peptide
IITSGGETNYADSVKG

SEQ ID NO: 713 - protein, 16 aa, synthetic construct
  REGION 1..16: note = Description of Artificial Sequence: Synthetic peptide
LITSGGETNYSDSVKG

SEQ ID NO: 714 - protein, 17 aa, synthetic construct
  REGION 1..17: note = Description of Artificial Sequence: Synthetic peptide
AINDHGDRTKYLDSVRG

SEQ ID NO: 715 - protein, 16 aa, synthetic construct
  REGION 1..16: note = Description of Artificial Sequence: Synthetic peptide
TSTHDGNTDYADSVKG

SEQ ID NO: 716 - protein, 16 aa, synthetic construct
  REGION 1..16: note = Description of Artificial Sequence: Synthetic peptide
TSTHDGNTDYADSVKG

SEQ ID NO: 717 - protein, 16 aa, synthetic construct
  REGION 1..16: note = Description of Artificial Sequence: Synthetic peptide
IMTSDGSTNYGDSVKG

SEQ ID NO: 718 - protein, 16 aa, synthetic construct
  REGION 1..16: note = Description of Artificial Sequence: Synthetic peptide
TSTRDGNIDYADSVKG

SEQ ID NO: 719 - protein, 16 aa, synthetic construct
  REGION 1..16: note = Description of Artificial Sequence: Synthetic peptide
TISSGDSTWYTNSVKG

SEQ ID NO: 720 - protein, 16 aa, synthetic construct
  REGION 1..16: note = Description of Artificial Sequence: Synthetic peptide
TISSGDSTWYTNSVKG

SEQ ID NO: 721 - protein, 16 aa, synthetic construct
  REGION 1..16: note = Description of Artificial Sequence: Synthetic peptide
TSTHDGNTDYTDSVKG

SEQ ID NO: 722 - protein, 16 aa, synthetic construct
  REGION 1..16: note = Description of Artificial Sequence: Synthetic peptide
TSTRDANTDYAGSVKG

SEQ ID NO: 723 - protein, 16 aa, synthetic construct
  REGION 1..16: note = Description of Artificial Sequence: Synthetic peptide
TITSADSTWYTNSVKG

SEQ ID NO: 724 - protein, 16 aa, synthetic construct
  REGION 1..16: note = Description of Artificial Sequence: Synthetic peptide
TISSGDSTWYTNSVKG

SEQ ID NO: 725 - protein, 16 aa, synthetic construct
  REGION 1..16: note = Description of Artificial Sequence: Synthetic peptide
TITSADSTWYTNSVKG

SEQ ID NO: 726 - protein, 17 aa, synthetic construct
  REGION 1..17: note = Description of Artificial Sequence: Synthetic peptide
GLGWSPGNTYYADSVKG

SEQ ID NO: 727 - protein, 16 aa, synthetic construct
  REGION 1..16: note = Description of Artificial Sequence: Synthetic peptide
TSTHDGNTDYADSVKG

SEQ ID NO: 728 - protein, 16 aa, synthetic construct
  REGION 1..16: note = Description of Artificial Sequence: Synthetic peptide
TISSGDSTWYTNSVKG

SEQ ID NO: 729 - protein, 16 aa, synthetic construct
  REGION 1..16: note = Description of Artificial Sequence: Synthetic peptide
RITSGGTTDYADSVKG

SEQ ID NO: 730 - protein, 16 aa, synthetic construct
  REGION 1..16: note = Description of Artificial Sequence: Synthetic peptide
TSTHDGSTDYADSVKG

SEQ ID NO: 731 - protein, 16 aa, synthetic construct
  REGION 1..16: note = Description of Artificial Sequence: Synthetic peptide
TSTWDGNTDYADSVKG

SEQ ID NO: 732 - protein, 16 aa, synthetic construct
  REGION 1..16: note = Description of Artificial Sequence: Synthetic peptide
TSTHDGNTDYADSVKG

SEQ ID NO: 733 - protein, 16 aa, synthetic construct
  REGION 1..16: note = Description of Artificial Sequence: Synthetic peptide
TITRFATTNYADSVKG

SEQ ID NO: 734 - protein, 16 aa, synthetic construct
  REGION 1..16: note = Description of Artificial Sequence: Synthetic peptide
AISSGGSTDYADSVKG

SEQ ID NO: 735 - protein, 16 aa, synthetic construct
  REGION 1..16: note = Description of Artificial Sequence: Synthetic peptide
TISSGDSTWYTNSVKG

SEQ ID NO: 736 - protein, 16 aa, synthetic construct
  REGION 1..16: note = Description of Artificial Sequence: Synthetic peptide
TSTHAGNTDYADSVKG

SEQ ID NO: 737 - protein, 16 aa, synthetic construct
  REGION 1..16: note = Description of Artificial Sequence: Synthetic peptide
TSTHDGNSDYADSVKG

SEQ ID NO: 738 - protein, 16 aa, synthetic construct
  REGION 1..16: note = Description of Artificial Sequence: Synthetic peptide
TSTRDGNVDYADSVKG

SEQ ID NO: 739 - protein, 17 aa, synthetic construct
  REGION 1..17: note = Description of Artificial Sequence: Synthetic peptide
GVSWSYGNTYYADSVKG

SEQ ID NO: 740 - protein, 16 aa, synthetic construct
  REGION 1..16: note = Description of Artificial Sequence: Synthetic peptide
GIGRSERTYYTDSVKG

SEQ ID NO: 741 - protein, 16 aa, synthetic construct
  REGION 1..16: note = Description of Artificial Sequence: Synthetic peptide
IITSGGETNYADSVKG

SEQ ID NO: 742 - protein, 16 aa, synthetic construct
  REGION 1..16: note = Description of Artificial Sequence: Synthetic peptide
TISSGDSTWYTNSVKG

SEQ ID NO: 743 - protein, 17 aa, synthetic construct
  REGION 1..17: note = Description of Artificial Sequence: Synthetic peptide
AINDHGDRTKYLDSVKG

SEQ ID NO: 744 - protein, 17 aa, synthetic construct
  REGION 1..17: note = Description of Artificial Sequence: Synthetic peptide
GLGWSPGNTYYADSVKG

SEQ ID NO: 745 - protein, 16 aa, synthetic construct
  REGION 1..16: note = Description of Artificial Sequence: Synthetic peptide
RITSGGTTDYADSVKG

SEQ ID NO: 746 - protein, 16 aa, synthetic construct
  REGION 1..16: note = Description of Artificial Sequence: Synthetic peptide
IMTSDGSTNYDDSVKG

SEQ ID NO: 747 - protein, 16 aa, synthetic construct
  REGION 1..16: note = Description of Artificial Sequence: Synthetic peptide
TITRFATTNYADSVKG

SEQ ID NO: 748 - protein, 16 aa, synthetic construct
  REGION 1..16: note = Description of Artificial Sequence: Synthetic peptide
AISSGGSTDYADSVKG

SEQ ID NO: 749 - protein, 13 aa, synthetic construct
  REGION 1..13: note = Description of Artificial Sequence: Synthetic peptide
DLRTAVDLIRANY

SEQ ID NO: 750 - protein, 16 aa, synthetic construct
  REGION 1..16: note = Description of Artificial Sequence: Synthetic peptide
RVSREVIPTRWDLYNY

SEQ ID NO: 751 - protein, 6 aa, synthetic construct
  REGION 1..6: note = Description of Artificial Sequence: Synthetic peptide
VPPLGS

SEQ ID NO: 752 - protein, 19 aa, synthetic construct
  REGION 1..19: note = Description of Artificial Sequence: Synthetic peptide
TFQTTDMVDVPTTQHEYDY

SEQ ID NO: 753 - protein, 13 aa, synthetic construct
  REGION 1..13: note = Description of Artificial Sequence: Synthetic peptide
DLRTAVDLIRANY

SEQ ID NO: 754 - protein, 13 aa, synthetic construct
  REGION 1..13: note = Description of Artificial Sequence: Synthetic peptide
DLRTAVDLIRANY

SEQ ID NO: 755 - protein, 15 aa, synthetic construct
  REGION 1..15: note = Description of Artificial Sequence: Synthetic peptide
ALYYRDSRRAADYPY

SEQ ID NO: 756 - protein, 19 aa, synthetic construct
  REGION 1..19: note = Description of Artificial Sequence: Synthetic peptide
TFQTSDNVGVPTVQHEYDY

SEQ ID NO: 757 - protein, 13 aa, synthetic construct
  REGION 1..13: note = Description of Artificial Sequence: Synthetic peptide
DLRTAVDLIRANY

SEQ ID NO: 758 - protein, 13 aa, synthetic construct
  REGION 1..13: note = Description of Artificial Sequence: Synthetic peptide
DLRTAVDLIRANY

SEQ ID NO: 759 - protein, 13 aa, synthetic construct
  REGION 1..13: note = Description of Artificial Sequence: Synthetic peptide
DLRTAVDLIRANY

SEQ ID NO: 760 - protein, 15 aa, synthetic construct
  REGION 1..15: note = Description of Artificial Sequence: Synthetic peptide
ALYYRDSRRAADYPY

SEQ ID NO: 761 - protein, 6 aa, synthetic construct
  REGION 1..6: note = Description of Artificial Sequence: Synthetic peptide
VPPLGS

SEQ ID NO: 762 - protein, 6 aa, synthetic construct
  REGION 1..6: note = Description of Artificial Sequence: Synthetic peptide
VPPLGS

SEQ ID NO: 763 - protein, 16 aa, synthetic construct
  REGION 1..16: note = Description of Artificial Sequence: Synthetic peptide
GPLVDYLETTPLVYTY

SEQ ID NO: 764 - protein, 13 aa, synthetic construct
  REGION 1..13: note = Description of Artificial Sequence: Synthetic peptide
DLRTAVDLIRANY

SEQ ID NO: 765 - protein, 13 aa, synthetic construct
  REGION 1..13: note = Description of Artificial Sequence: Synthetic peptide
DLRTAVDLIRANY

SEQ ID NO: 766 - protein, 5 aa, synthetic construct
  REGION 1..5: note = Description of Artificial Sequence: Synthetic peptide
VPPRY

SEQ ID NO: 767 - protein, 13 aa, synthetic construct
  REGION 1..13: note = Description of Artificial Sequence: Synthetic peptide
DLRTAVDLIRANY

SEQ ID NO: 768 - protein, 15 aa, synthetic construct
  REGION 1..15: note = Description of Artificial Sequence: Synthetic peptide
ALYYRDSRRAADYPY

SEQ ID NO: 769 - protein, 15 aa, synthetic construct
  REGION 1..15: note = Description of Artificial Sequence: Synthetic peptide
ALYYGDSRRAADYPY

SEQ ID NO: 770 - protein, 13 aa, synthetic construct
  REGION 1..13: note = Description of Artificial Sequence: Synthetic peptide
DLRTAVDLIRANY

SEQ ID NO: 771 - protein, 13 aa, synthetic construct
  REGION 1..13: note = Description of Artificial Sequence: Synthetic peptide
DLRTAVDLIRANY

SEQ ID NO: 772 - protein, 15 aa, synthetic construct
  REGION 1..15: note = Description of Artificial Sequence: Synthetic peptide
ALYYGDSRRAADYPY

SEQ ID NO: 773 - protein, 15 aa, synthetic construct
  REGION 1..15: note = Description of Artificial Sequence: Synthetic peptide
ALYYRDSWRAADYPY

SEQ ID NO: 774 - protein, 15 aa, synthetic construct
  REGION 1..15: note = Description of Artificial Sequence: Synthetic peptide
ALYYGDSRRAADYPY

SEQ ID NO: 775 - protein, 15 aa, synthetic construct
  REGION 1..15: note = Description of Artificial Sequence: Synthetic peptide
RRGDVIYTTPWNYVY

SEQ ID NO: 776 - protein, 13 aa, synthetic construct
  REGION 1..13: note = Description of Artificial Sequence: Synthetic peptide
DLRTPVDLIRANY

SEQ ID NO: 777 - protein, 15 aa, synthetic construct
  REGION 1..15: note = Description of Artificial Sequence: Synthetic peptide
ALYYRDSRRAIDYPY

SEQ ID NO: 778 - protein, 14 aa, synthetic construct
  REGION 1..14: note = Description of Artificial Sequence: Synthetic peptide
DLTYRNLLLKLPHY

SEQ ID NO: 779 - protein, 13 aa, synthetic construct
  REGION 1..13: note = Description of Artificial Sequence: Synthetic peptide
DLRTPVDLIRANY

SEQ ID NO: 780 - protein, 13 aa, synthetic construct
  REGION 1..13: note = Description of Artificial Sequence: Synthetic peptide
DLRTAVDLIRANY

SEQ ID NO: 781 - protein, 13 aa, synthetic construct
  REGION 1..13: note = Description of Artificial Sequence: Synthetic peptide
DLRTAVDLIRANY

SEQ ID NO: 782 - protein, 15 aa, synthetic construct
  REGION 1..15: note = Description of Artificial Sequence: Synthetic peptide
IGLRGVPDVNRQFEV

SEQ ID NO: 783 - protein, 13 aa, synthetic construct
  REGION 1..13: note = Description of Artificial Sequence: Synthetic peptide
DVRTSRNLVRSDY

SEQ ID NO: 784 - protein, 15 aa, synthetic construct
  REGION 1..15: note = Description of Artificial Sequence: Synthetic peptide
ALYYGDSRRAGDYPY

SEQ ID NO: 785 - protein, 13 aa, synthetic construct
  REGION 1..13: note = Description of Artificial Sequence: Synthetic peptide
DLRTAVDLIRANY

SEQ ID NO: 786 - protein, 13 aa, synthetic construct
  REGION 1..13: note = Description of Artificial Sequence: Synthetic peptide
DLRTPVDRIRGNF

SEQ ID NO: 787 - protein, 13 aa, synthetic construct
  REGION 1..13: note = Description of Artificial Sequence: Synthetic peptide
DLRTAVDLIRANY

SEQ ID NO: 788 - protein, 16 aa, synthetic construct
  REGION 1..16: note = Description of Artificial Sequence: Synthetic peptide
RVSREVIPTRWDLYNY

SEQ ID NO: 789 - protein, 19 aa, synthetic construct
  REGION 1..19: note = Description of Artificial Sequence: Synthetic peptide
TFQTTDMVDVPTTQHEYDY

SEQ ID NO: 790 - protein, 6 aa, synthetic construct
  REGION 1..6: note = Description of Artificial Sequence: Synthetic peptide
VPPLGS

SEQ ID NO: 791 - protein, 15 aa, synthetic construct
  REGION 1..15: note = Description of Artificial Sequence: Synthetic peptide
ALYYGDSRRAADYPY

SEQ ID NO: 792 - protein, 16 aa, synthetic construct
  REGION 1..16: note = Description of Artificial Sequence: Synthetic peptide
GPLVDYLETTPLVYTY

SEQ ID NO: 793 - protein, 15 aa, synthetic construct
  REGION 1..15: note = Description of Artificial Sequence: Synthetic peptide
RRGDVIYTTPWNYVY

SEQ ID NO: 794 - protein, 14 aa, synthetic construct
  REGION 1..14: note = Description of Artificial Sequence: Synthetic peptide
DLTYRNLLLKLPHY

SEQ ID NO: 795 - protein, 5 aa, synthetic construct
  REGION 1..5: note = Description of Artificial Sequence: Synthetic peptide
VPPRY

SEQ ID NO: 796 - protein, 15 aa, synthetic construct
  REGION 1..15: note = Description of Artificial Sequence: Synthetic peptide
IGLRGVPDVNRQFEV

SEQ ID NO: 797 - protein, 13 aa, synthetic construct
  REGION 1..13: note = Description of Artificial Sequence: Synthetic peptide
DVRTSRNLVRSDY

SEQ ID NO: 798 - protein, 121 aa, synthetic construct
  REGION 1..121: note = Description of Artificial Sequence: Synthetic polypeptide
QVQLQESGGGLVQAGGSLRLSCAASGSIAYIYTMDWYRQAPGKQRELVATSTRDGNVDYAESVKGRFTISRDNAKNTVYLQMNSLKPEDTAVYYCNADLRTAVDLIRANYWGQGTQVTVSS

SEQ ID NO: 799 - protein, 125 aa, synthetic construct
  REGION 1..125: note = Description of Artificial Sequence: Synthetic polypeptide
QVQLQESGGGLVQAGDSLRLSCVVSGRTDSWYVMGWFRQAPGKDREFVAGVSWSYGNTYYADSVKGRFTASRDNAKNTAYLQMNSLNAEDTAVYYCAARVSREVIPTRWDLYNYWGQGTQVTVSS

SEQ ID NO: 800 - protein, 114 aa, synthetic construct
  REGION 1..114: note = Description of Artificial Sequence: Synthetic polypeptide
QVQLQESGGGSVQPGGSLRVSCVVSRTIISINAMTWYHQAPGKRRELVAIITSGGETNYADSVKGRFTISRDNAKNTAYLQMNNLKPEDTGVYYCNVVPPLGSWGQGTQVTVSS

SEQ ID NO: 801 - protein, 127 aa, synthetic construct
  REGION 1..127: note = Description of Artificial Sequence: Synthetic polypeptide
QVQLQESGGGRVQAGGSLRLSCSASARTLRLYAVGWFRQAPGKEREFVAGIGRSERTYYTDSVKGRFTLSRDNAKNTVFLEMNDLEPEDTAVYFCALTFQTTDMVDVPTTQHEYDYWGRGTQVTVSS

SEQ ID NO: 802 - protein, 121 aa, synthetic construct
  REGION 1..121: note = Description of Artificial Sequence: Synthetic polypeptide
QVQLQESGGGLVQAGGSLRLSCAASGSIAYIYTMDWYRQAPGKQRELVATSTHDGNTDYADSVKGRFTISRDNVKNTVYLQMNSLKPEDTAVYYCNADLRTAVDLIRANYWGQGTQVTVSS

SEQ ID NO: 803 - protein, 121 aa, synthetic construct
  REGION 1..121: note = Description of Artificial Sequence: Synthetic polypeptide
QVQLQESGGGLVQPGGSLRLSCAASGSIAYIYTMDWYRQAPGKQRELVATSTRDGNTDYADSVKGRFTISRDNAKDTVYLQMNSLKPEDTAVYYCNADLRTAVDLIRANYWGQGTQVTVSS

SEQ ID NO: 804 - protein, 119 aa, synthetic construct
  REGION 1..119: note = Description of Artificial Sequence: Synthetic polypeptide
QVQLQESGGGLVQAGGSLTLSCAASGRYQMAWFRQAPEKEREFVGTISSGDSTWYTNSVKGRFAISRDSARNTVYLQMNDLKPEDTAIYYCAAALYYRDSRRAADYPYWGQGTQVTVSS

SEQ ID NO: 805 - protein, 127 aa, synthetic construct
  REGION 1..127: note = Description of Artificial Sequence: Synthetic polypeptide
QVQLQESGGGRVQAGESLRLSCSTSTRTLKLYAVGWFRQAPGKERDFVAGIGRSERIYYIDSVKGRFTLSRDNAKNTVFLEMNDLEPEDTAVYFCAATFQTSDNVGVPTVQHEYDYWGQGTQVTVSS

SEQ ID NO: 806 - protein, 121 aa, synthetic construct
  REGION 1..121: note = Description of Artificial Sequence: Synthetic polypeptide
QVQLQESGGGLVQAGGSLRLSCAASGSIAYIYTMDWYRQAPGKQRELVATSTHDGNTDYADSVKGRFTISRDNAKNTVTLQMNSLKPEDTAVYYCNADLRTAVDLIRANYWGQGTQVTVSS

SEQ ID NO: 807 - protein, 121 aa, synthetic construct
  REGION 1..121: note = Description of Artificial Sequence: Synthetic polypeptide
QVQLQESGGGLVQAGGSLRLSCAASGSIAYIYTMDWYRQAPGKQRELVATFTRDGNTDYADSVKGRFTISRDNAKNTVYLQMNSLKPEDTAVYYCNTDLRTAVDLIRANYWGQGTQVTVSS

SEQ ID NO: 808 - protein, 121 aa, synthetic construct
  REGION 1..121: note = Description of Artificial Sequence: Synthetic polypeptide
QVQLQESGGGLVQAGGSLRLSCAASGSIAYIYTMDWYRQAPGKQRELVATSTHDGNTDYADSLKGRFTISRDNAKNTVYLQMNSLKPEDTAVYYCNADLRTAVDLIRANYWGQGTQVTVSS

SEQ ID NO: 809 - protein, 119 aa, synthetic construct
  REGION 1..119: note = Description of Artificial Sequence: Synthetic polypeptide
QVQLQESGGGSVQAGGSLRLSCAASGRYQMAWFRQAPEKEREFVGTISSGDSTWYTNSLKGRFAISRDSARDTVYLQMNDLKPEDTAVYYCAAALYYRDSRRAADYPYWGQGTQVTVSS

SEQ ID NO: 810 - protein, 114 aa, synthetic construct
  REGION 1..114: note = Description of Artificial Sequence: Synthetic polypeptide
QVQLQESGGGLVQTGGSLRLSCAVSGSIVTINAMTWYRQAPGKRRELVAIITSGGETNYADSVKGRFTISRDNAKNTAHLQMNSLNPEDTGVYYCNVVPPLGSWGQGTQVTVSS

SEQ ID NO: 811 - protein, 114 aa, synthetic construct
  REGION 1..114: note = Description of Artificial Sequence: Synthetic polypeptide
QVQLQESGGGLVQTGGSLRLSCAVSRSIVSIKSMTWYRQAPGKRRELVALITSGGETNYSDSVKGRFTISRDNAKNTVYLQMNSLKPEDTGVYYCNVVPPLGSWGQGTQVTVSS

SEQ ID NO: 812 - protein, 125 aa, synthetic construct
  REGION 1..125: note = Description of Artificial Sequence: Synthetic polypeptide
QVQLQESGGGLVETGGSLRLSCAGSGSTFRHHAMAWFRQTPGKEREFVSAINDHGDRTKYLDSVRGRFTISRDNTDNMVYLQMTDLRPEDTANYSCAAGPLVDYLETTPLVYTYWGHGTQVTVSS

SEQ ID NO: 813 - protein, 121 aa, synthetic construct
  REGION 1..121: note = Description of Artificial Sequence: Synthetic polypeptide
QVQLQESGGGLVQAGGSLRLSCAASGSIAYIYTMDWYRQAPGKQRELVATSTHDGNTDYADSVKGRFTISRDNAKNTVYLQMNSLKPEDTAVYYCNADLRTAVDLIRANYWGQGTQVTVSS

SEQ ID NO: 814 - protein, 121 aa, synthetic construct
  REGION 1..121: note = Description of Artificial Sequence: Synthetic polypeptide
QVQLQESGGGSVQAGGSLTLSCAASGSIAYIYTMDWYRQAPGKQRELVATSTHDGNTDYADSVKGRFTISRDNAKNTVYLQMNSLKPEDTAVYYCNADLRTAVDLIRANYWGQGTQVTVSS

SEQ ID NO: 815 - protein, 113 aa, synthetic construct
  REGION 1..113: note = Description of Artificial Sequence: Synthetic polypeptide
QVQLQESGGGLVQPGGSLRLSCTASVSIFSVNAVDWYRQSPGKERELVAIMTSDGSTNYGDSVKGRFTISRDNAKNTVYLQMNNLKPEDTAVYYCNTVPPRYWGQGTQVTVSS

SEQ ID NO: 816 - protein, 121 aa, synthetic construct
  REGION 1..121: note = Description of Artificial Sequence: Synthetic polypeptide
QVQLQESGGGLVQPGGSLRLSCAASGSIAYIYTMDWYRQAPGKQRELVATSTRDGNIDYADSVKGRFTISRDSAKNTVYLQMSSLKPEDTAVYYCNADLRTAVDLIRANYWGQGTQVTVSS

SEQ ID NO: 817 - protein, 119 aa, synthetic construct
  REGION 1..119: note = Description of Artificial Sequence: Synthetic polypeptide
QVQLQESGGGLVQAGGSLTLSCAASGRYQLAWFRQAPEKVREFVGTISSGDSTWYTNSVKGRFAISRDSARNTVYLQMNDLKPEDTAVYYCAAALYYRDSRRAADYPYWGQGTQVTVSS

SEQ ID NO: 818 - protein, 119 aa, synthetic construct
  REGION 1..119: note = Description of Artificial Sequence: Synthetic polypeptide
QVQLQESGGGSVQAGGSLRLSCAASGRYHMAWFRQAPEKEREFVGTISSGDSTWYTNSVKGRFAISRDSARNTAYLQMNDLKPEDTAVYYCAAALYYGDSRRAADYPYWGQGTQVTVSS

SEQ ID NO: 819 - protein, 121 aa, synthetic construct
  REGION 1..121: note = Description of Artificial Sequence: Synthetic polypeptide
QVQLQESGGGSVQAGGSLRLSCAASGSIAYIYTMDWYRQAPGKQRELVATSTHDGNTDYTDSVKGRFTISRDNAKNTVYLQMNSLKPEDTAVYYCNADLRTAVDLIRANYWGQGTQVTVSS

SEQ ID NO: 820 - protein, 121 aa, synthetic construct
  REGION 1..121: note = Description of Artificial Sequence: Synthetic polypeptide
QVQLQESGGGLVQAGGSLRLSCAASGSIAYIYTMDWYRQTPGKQRELVATSTRDANTDYAGSVKGRFTISRDNAKDTVYLQMNSLKPEDTAVYYCHADLRTAVDLIRANYWGQGTQVTVSS

SEQ ID NO: 821 - protein, 119 aa, synthetic construct
  REGION 1..119: note = Description of Artificial Sequence: Synthetic polypeptide
QVQLQESGGGLVQAGGSLRLSCAASGRYNMAWFRQAPEKEREFVGTITSADSTWYTNSVKGRFAITQDSARNTVYLQMNDLKPEDTAVYYCAAALYYGDSRRAADYPYWGQGTQVTVSS

SEQ ID NO: 822 - protein, 119 aa, synthetic construct
  REGION 1..119: note = Description of Artificial Sequence: Synthetic polypeptide
QVQLQESGGGLVQPGGSLRLSCAASGRYQMAWFRQAPEKEREFVGTISSGDSTWYTNSVKGRFAISRDSARTTVYLQMNDLKPEDTAVYYCAAALYYRDSWRAADYPYWGQGTQVTVSS

SEQ ID NO: 823 - protein, 119 aa, synthetic construct
  REGION 1..119: note = Description of Artificial Sequence: Synthetic polypeptide
QVQLQESGGGLVQPGESLRLSCAATGRYHLAWFRQAPEKEREFVGTITSADSTWYTNSVKGRFAITRDSARNTVYLQMNDLKPEDTAVYYCAAALYYGDSRRAADYPYWGQGTQVTVSS

SEQ ID NO: 824 - protein, 124 aa, synthetic construct
  REGION 1..124: note = Description of Artificial Sequence: Synthetic polypeptide
QVQLQESGGGLVQAGGSLKLSCADSGRSFSNYIMGWFRQAPGKEREFVAGLGWSPGNTYYADSVKGRFTISRDNAKNMVYLQMNSLNPEDTAVYYCAARRGDVIYTTPWNYVYWGQGTQVTVSS

SEQ ID NO: 825 - protein, 121 aa, synthetic construct
  REGION 1..121: note = Description of Artificial Sequence: Synthetic polypeptide
QVQLQESGGGLVQAGGSLRLSCAASGSIAYIYTMDWYRQAPGKQRELVATSTHDGNTDYADSVKGRFTISRDNAKNTVYLQMNSLKPEDTAVYYCNADLRTPVDLIRANYWGQGTQVTVSS

SEQ ID NO: 826 - protein, 119 aa, synthetic construct
  REGION 1..119: note = Description of Artificial Sequence: Synthetic polypeptide
QVQLQESGGGSVQAGGSLRLSCAAPGRYQMAWFRQAPEKEREFVGTISSGDSTWYTNSVKGRFAISRDSARNTVYLQMNDLKSEDTAVYYCAAALYYRDSRRAIDYPYWGQGTQVTVSS

SEQ ID NO: 827 - protein, 122 aa, synthetic construct
  REGION 1..122: note = Description of Artificial Sequence: Synthetic polypeptide
QVQLQESGGGSVQAGGSLRLSCAASGLTFSSYAMAWFRQAPGKQRELVARITSGGTTDYADSVKGRFTISRDNAKNTMYLQMNSLKPEDTAVYYCAADLTYRNLLLKLPHYWGQGTQVTVSS

SEQ ID NO: 828 - protein, 121 aa, synthetic construct
  REGION 1..121: note = Description of Artificial Sequence: Synthetic polypeptide
QVQLQESGGGLVQAGGSLRLSCAASGNIAYIYTMDWYRQAPGKQRELVATSTHDGSTDYADSVKGRFTISRDNAKNTVYLQMNSLKPEDTAVYYCNADLRTPVDLIRANYWGQGTQVTVSS

SEQ ID NO: 829 - protein, 121 aa, synthetic construct
  REGION 1..121: note = Description of Artificial Sequence: Synthetic polypeptide
QVQLQESGGGLVQPGGSLRLSCAASGSIAYIYTMDWYRQAPGKQRELVATSTWDGNTDYADSVKGRFTISRDNAKNTVYLQMNSLKPEDTAVYYCNADLRTAVDLIRANYWGQGTQVTVSS

SEQ ID NO: 830 - protein, 121 aa, synthetic construct
  REGION 1..121: note = Description of Artificial Sequence: Synthetic polypeptide
QVQLQESGGGLVQAGGSLRLSCAASGSIAYIYTMDWYRQAPGKQRELVATSTHDGNTDYADSVKGRFTISRDNAKNTVYLQMSSLKPDDTAVYYCNADLRTAVDLIRANYWGQGTQVTVSS

SEQ ID NO: 831 - protein, 123 aa, synthetic construct
  REGION 1..123: note = Description of Artificial Sequence: Synthetic polypeptide
QVQLQESGGGLVQAGESLSLSCAASGNDFVITDMHWYRQAPGKQREWVATITRFATTNYADSVKGRFTISRDNAKNTWYLQMNSLKPDDTAVYYCKAIGLRGVPDVNRQFEVWGQGTQVTVSS

SEQ ID NO: 832 - protein, 121 aa, synthetic construct
  REGION 1..121: note = Description of Artificial Sequence: Synthetic polypeptide
QVQLQESGGGLVQAGGSLRLSCAASGAIAYIYGMGWYRQAPGNQRELVAAISSGGSTDYADSVKGRFTISRDNAKNTVYLQMSSLKPEDTAVYYCNADVRTSRNLVRSDYWGQGTQVTVSS

SEQ ID NO: 833 - protein, 119 aa, synthetic construct
  REGION 1..119: note = Description of Artificial Sequence: Synthetic polypeptide
QVQLQESGGGLVQAGGSLRLSCAASGRYHTAWFRQAPEKEREFVGTISSGDSTWYTNSVKGRFAISRDSARNTVYLQMNDLKPEDTAVYYCAAALYYGDSRRAGDYPYWGQGTQVTVSS

SEQ ID NO: 834 - protein, 121 aa, synthetic construct
  REGION 1..121: note = Description of Artificial Sequence: Synthetic polypeptide
QVQLQESGGGLVQAGGSLRLSCAASGNIAYIYTMNWYRQAPGKQRELVATSTHAGNTDYADSVKGRFTISRDNAKNTVYLQMNSLKPEDTAVYYCNVDLRTAVDLIRANYWGQGTQVTVSS

SEQ ID NO: 835 - protein, 121 aa, synthetic construct
  REGION 1..121: note = Description of Artificial Sequence: Synthetic polypeptide
QVQLQESGGGLVQPGGSLRLSCAASGNIAYIYTMGWYRQAPGKQRELVATSTHDGNSDYADSVKGRFTISRDNAKNTVYLQMNTLKPDDTAVYYCNADLRTPVDRIRGNFWGQGTQVTVSS

SEQ ID NO: 836 - protein, 121 aa, synthetic construct
  REGION 1..121: note = Description of Artificial Sequence: Synthetic polypeptide
EVQLLESGGGLVQPGGSLTLSCAASGSIAYIYTMDWYRQAPGKQRELVATSTRDGNVDYADSVKGRFTISRDNSKNTLYLQMNSLRAEDTAVYYCNADLRTAVDLIRANYWGLGTQVTVSS

SEQ ID NO: 837 - protein, 125 aa, synthetic construct
  REGION 1..125: note = Description of Artificial Sequence: Synthetic polypeptide
EVQLLESGGGLVQPGGSLTLSCAASGRTDSWYVMGWFRQAPGKDREFVAGVSWSYGNTYYADSVKGRFTISRDNSKNTLYLQMNSLRAEDTAVYYCAARVSREVIPTRWDLYNYWGLGTQVTVSS

SEQ ID NO: 838 - protein, 127 aa, synthetic construct
  REGION 1..127: note = Description of Artificial Sequence: Synthetic polypeptide
EVQLLESGGGLVQPGGSLTLSCAASARTLRLYAVGWFRQAPGKEREFVAGIGRSERTYYTDSVKGRFTISRDNSKNTLYLQMNSLRAEDTAVYYCALTFQTTDMVDVPTTQHEYDYWGLGTQVTVSS

SEQ ID NO: 839 - protein, 114 aa, synthetic construct
  REGION 1..114: note = Description of Artificial Sequence: Synthetic polypeptide
EVQLLESGGGLVQPGGSLTLSCAASGSIVTINAMTWYRQAPGKRRELVAIITSGGETNYADSVKGRFTISRDNSKNTLYLQMNSLRAEDTAVYYCNVVPPLGSWGLGTQVTVSS

SEQ ID NO: 840 - protein, 119 aa, synthetic construct
  REGION 1..119: note = Description of Artificial Sequence: Synthetic polypeptide
EVQLLESGGGLVQPGGSLTLSCAASGRYHMAWFRQAPGKEREFVGTISSGDSTWYTNSVKGRFTISRDNSKNTLYLQMNSLRAEDTAVYYCAAALYYGDSRRAADYPYWGLGTQVTVSS

SEQ ID NO: 841 - protein, 125 aa, synthetic construct
  REGION 1..125: note = Description of Artificial Sequence: Synthetic polypeptide
EVQLLESGGGLVQPGGSLTLSCAASGSTFRHHAMAWFRQTPGKEREFVSAINDHGDRTKYLDSVKGRFTISRDNSKNTLYLQMNSLRAEDTAVYYCAAGPLVDYLETTPLVYTYWGLGTQVTVSS

SEQ ID NO: 842 - protein, 124 aa, synthetic construct
  REGION 1..124: note = Description of Artificial Sequence: Synthetic polypeptide
EVQLLESGGGLVQPGGSLTLSCAASGRSFSNYIMGWFRQAPGKEREFVAGLGWSPGNTYYADSVKGRFTISRDNSKNTLYLQMNSLRAEDTAVYYCAARRGDVIYTTPWNYVYWGLGTQVTVSS

SEQ ID NO: 843 - protein, 122 aa, synthetic construct
  REGION 1..122: note = Description of Artificial Sequence: Synthetic polypeptide
EVQLLESGGGLVQPGGSLTLSCAASGLTFSSYAMAWFRQAPGKQRELVARITSGGTTDYADSVKGRFTISRDNSKNTLYLQMNSLRAEDTAVYYCAADLTYRNLLLKLPHYWGLGTQVTVSS

SEQ ID NO: 844 - protein, 113 aa, synthetic construct
  REGION 1..113: note = Description of Artificial Sequence: Synthetic polypeptide
EVQLLESGGGLVQPGGSLTLSCAASVSIFSVNAVDWYRQSPGKERELVAIMTSDGSTNYDDSVKGRFTISRDNSKNTLYLQMNSLRAEDTAVYYCNTVPPRYWGLGTQVTVSS

SEQ ID NO: 845 - protein, 123 aa, synthetic construct
  REGION 1..123: note = Description of Artificial Sequence: Synthetic polypeptide
EVQLLESGGGLVQPGGSLTLSCAASGNDFVITDMHWYRQAPGKQREWVATITRFATTNYADSVKGRFTISRDNSKNTLYLQMNSLRAEDTAVYYCKAIGLRGVPDVNRQFEVWGLGTQVTVSS

SEQ ID NO: 846 - protein, 121 aa, synthetic construct
  REGION 1..121: note = Description of Artificial Sequence: Synthetic polypeptide
EVQLLESGGGLVQPGGSLTLSCAASGAIAYIYGMGWYRQAPGKQRELVAAISSGGSTDYADSVKGRFTISRDNSKNTLYLQMNSLRAEDTAVYYCNADVRTSRNLVRSDYWGLGTQVTVSS

SEQ ID NO: 847 - protein, 10 aa, synthetic construct
  REGION 1..10: note = Description of Artificial Sequence: Synthetic peptide
GFIFRAASMA

SEQ ID NO: 848 - protein, 10 aa, synthetic construct
  REGION 1..10: note = Description of Artificial Sequence: Synthetic peptide
GFIFRAASMG

SEQ ID NO: 849 - protein, 10 aa, synthetic construct
  REGION 1..10: note = Description of Artificial Sequence: Synthetic peptide
GFIFRAASMD

SEQ ID NO: 850 - protein, 10 aa, synthetic construct
  REGION 1..10: note = Description of Artificial Sequence: Synthetic peptide
GFIFRAASMG

SEQ ID NO: 851 - protein, 10 aa, synthetic construct
  REGION 1..10: note = Description of Artificial Sequence: Synthetic peptide
GFIFRAASMD

SEQ ID NO: 852 - protein, 10 aa, synthetic construct
  REGION 1..10: note = Description of Artificial Sequence: Synthetic peptide
GDTFLRYAMG

SEQ ID NO: 853 - protein, 10 aa, synthetic construct
  REGION 1..10: note = Description of Artificial Sequence: Synthetic peptide
GDTFLRYAMG

SEQ ID NO: 854 - protein, 10 aa, synthetic construct
  REGION 1..10: note = Description of Artificial Sequence: Synthetic peptide
GDTFLRYAMG

SEQ ID NO: 855 - protein, 10 aa, synthetic construct
  REGION 1..10: note = Description of Artificial Sequence: Synthetic peptide
GDTFLRYAMG

SEQ ID NO: 856 - protein, 10 aa, synthetic construct
  REGION 1..10: note = Description of Artificial Sequence: Synthetic peptide
GFTFSSYYMS

SEQ ID NO: 857 - protein, 10 aa, synthetic construct
  REGION 1..10: note = Description of Artificial Sequence: Synthetic peptide
GFTFSSYYMS

SEQ ID NO: 858 - protein, 10 aa, synthetic construct
  REGION 1..10: note = Description of Artificial Sequence: Synthetic peptide
GFTFSDWAMS

SEQ ID NO: 859 - protein, 10 aa, synthetic construct
  REGION 1..10: note = Description of Artificial Sequence: Synthetic peptide
GFTFSDWAMS

SEQ ID NO: 860 - protein, 10 aa, synthetic construct
  REGION 1..10: note = Description of Artificial Sequence: Synthetic peptide
GNVFRAATMA

SEQ ID NO: 861 - protein, 10 aa, synthetic construct
  REGION 1..10: note = Description of Artificial Sequence: Synthetic peptide
GNVFRAATMA

SEQ ID NO: 862 - protein, 10 aa, synthetic construct
  REGION 1..10: note = Description of Artificial Sequence: Synthetic peptide
GNVFRAATMA

SEQ ID NO: 863 - protein, 10 aa, synthetic construct
  REGION 1..10: note = Description of Artificial Sequence: Synthetic peptide
GFAFGNHWMY

SEQ ID NO: 864 - protein, 10 aa, synthetic construct
  REGION 1..10: note = Description of Artificial Sequence: Synthetic peptide
GFAFGNHWMY

SEQ ID NO: 865 - protein, 10 aa, synthetic construct
  REGION 1..10: note = Description of Artificial Sequence: Synthetic peptide
GFAFGNHWMY

SEQ ID NO: 866 - protein, 10 aa, synthetic construct
  REGION 1..10: note = Description of Artificial Sequence: Synthetic peptide
GFIFRAASIS

SEQ ID NO: 867 - protein, 10 aa, synthetic construct
  REGION 1..10: note = Description of Artificial Sequence: Synthetic peptide
GFIFRAASMG

SEQ ID NO: 868 - protein, 10 aa, synthetic construct
  REGION 1..10: note = Description of Artificial Sequence: Synthetic peptide
EYILSMYRMA

SEQ ID NO: 869 - protein, 10 aa, synthetic construct
  REGION 1..10: note = Description of Artificial Sequence: Synthetic peptide
EYILSMYRMA

SEQ ID NO: 870 - protein, 10 aa, synthetic construct
  REGION 1..10: note = Description of Artificial Sequence: Synthetic peptide
ESISSFIAVG

SEQ ID NO: 871 - protein, 10 aa, synthetic construct
  REGION 1..10: note = Description of Artificial Sequence: Synthetic peptide
ESISSFIAVG

SEQ ID NO: 872 - protein, 10 aa, synthetic construct
  REGION 1..10: note = Description of Artificial Sequence: Synthetic peptide
GSVFRANVMG

SEQ ID NO: 873 - protein, 10 aa, synthetic construct
  REGION 1..10: note = Description of Artificial Sequence: Synthetic peptide
GRTSSIFGMG

SEQ ID NO: 874 - protein, 12 aa, synthetic construct
  REGION 1..12: note = Description of Artificial Sequence: Synthetic peptide
GPIFSDTIRTMG

SEQ ID NO: 875 - protein, 10 aa, synthetic construct
  REGION 1..10: note = Description of Artificial Sequence: Synthetic peptide
GSIFGINAMG

SEQ ID NO: 876 - protein, 10 aa, synthetic construct
  REGION 1..10: note = Description of Artificial Sequence: Synthetic peptide
ANRFNINVMG

SEQ ID NO: 877 - protein, 8 aa, synthetic construct
  REGION 1..8: note = Description of Artificial Sequence: Synthetic peptide
GTILSTMA

SEQ ID NO: 878 - protein, 10 aa, synthetic construct
  REGION 1..10: note = Description of Artificial Sequence: Synthetic peptide
GSIFSLNTLA

SEQ ID NO: 879 - protein, 10 aa, synthetic construct
  REGION 1..10: note = Description of Artificial Sequence: Synthetic peptide
GIIFRGTTMG

SEQ ID NO: 880 - protein, 10 aa, synthetic construct
  REGION 1..10: note = Description of Artificial Sequence: Synthetic peptide
GFTLDDYTIG

SEQ ID NO: 881 - protein, 10 aa, synthetic construct
  REGION 1..10: note = Description of Artificial Sequence: Synthetic peptide
GNIVRMTNMA

SEQ ID NO: 882 - protein, 10 aa, synthetic construct
  REGION 1..10: note = Description of Artificial Sequence: Synthetic peptide
GFAFNDHAIL

SEQ ID NO: 883 - protein, 10 aa, synthetic construct
  REGION 1..10: note = Description of Artificial Sequence: Synthetic peptide
GSIFRASTMA

SEQ ID NO: 884 - protein, 10 aa, synthetic construct
  REGION 1..10: note = Description of Artificial Sequence: Synthetic peptide
GRINSINTMG

SEQ ID NO: 885 - protein, 16 aa, synthetic construct
  REGION 1..16: note = Description of Artificial Sequence: Synthetic peptide
SISSGAFTNYADSVKA

SEQ ID NO: 886 - protein, 16 aa, synthetic construct
  REGION 1..16: note = Description of Artificial Sequence: Synthetic peptide
TVSSGDFTNYADSVKG

SEQ ID NO: 887 - protein, 16 aa, synthetic construct
  REGION 1..16: note = Description of Artificial Sequence: Synthetic peptide
TISSGGFTNYADSVKG

SEQ ID NO: 888 - protein, 16 aa, synthetic construct
  REGION 1..16: note = Description of Artificial Sequence: Synthetic peptide
TVSSGGFTNYADSVKG

SEQ ID NO: 889 - protein, 16 aa, synthetic construct
  REGION 1..16: note = Description of Artificial Sequence: Synthetic peptide
TISSTGFTNYANSVKG

SEQ ID NO: 890 - protein, 17 aa, synthetic construct
  REGION 1..17: note = Description of Artificial Sequence: Synthetic peptide
AITWNGGNTDYAGSLKG

SEQ ID NO: 891 - protein, 17 aa, synthetic construct
  REGION 1..17: note = Description of Artificial Sequence: Synthetic peptide
AITWNGGNTDYAGSLKG

SEQ ID NO: 892 - protein, 17 aa, synthetic construct
  REGION 1..17: note = Description of Artificial Sequence: Synthetic peptide
AITWNGGNTDYADSLKG

SEQ ID NO: 893 - protein, 17 aa, synthetic construct
  REGION 1..17: note = Description of Artificial Sequence: Synthetic peptide
AITWNGGNTDYAGSLKG

SEQ ID NO: 894 - protein, 17 aa, synthetic construct
  REGION 1..17: note = Description of Artificial Sequence: Synthetic peptide
GIHYTGDWTNYADSVKG

SEQ ID NO: 895 - protein, 17 aa, synthetic construct
  REGION 1..17: note = Description of Artificial Sequence: Synthetic peptide
GIHYTGDWTNYADSVKG

SEQ ID NO: 896 - protein, 17 aa, synthetic construct
  REGION 1..17: note = Description of Artificial Sequence: Synthetic peptide
GIHYGDHTTHYADFVKG

SEQ ID NO: 897 - protein, 17 aa, synthetic construct
  REGION 1..17: note = Description of Artificial Sequence: Synthetic peptide
SIHYGDHTTHYADFVKG

SEQ ID NO: 898 - protein, 16 aa, synthetic construct
  REGION 1..16: note = Description of Artificial Sequence: Synthetic peptide
TIASGGTTNYADFVKG

SEQ ID NO: 899 - protein, 16 aa, synthetic construct
  REGION 1..16: note = Description of Artificial Sequence: Synthetic peptide
TIASGGTTNYADFVKG

SEQ ID NO: 900 - protein, 16 aa, synthetic construct
  REGION 1..16: note = Description of Artificial Sequence: Synthetic peptide
TIASGGTTNYADFVKG

SEQ ID NO: 901 - protein, 16 aa, synthetic construct
  REGION 1..16: note = Description of Artificial Sequence: Synthetic peptide
SISSGGSTNYVDSVKG

SEQ ID NO: 902 - protein, 16 aa, synthetic construct
  REGION 1..16: note = Description of Artificial Sequence: Synthetic peptide
SISSGGSTNYVDSVKG

SEQ ID NO: 903 - protein, 16 aa, synthetic construct
  REGION 1..16: note = Description of Artificial Sequence: Synthetic peptide
SISSGGSTNYVDSVKG

SEQ ID NO: 904 - protein, 16 aa, synthetic construct
  REGION 1..16: note = Description of Artificial Sequence: Synthetic peptide
TINSGGFTNYADSVLG

SEQ ID NO: 905 - protein, 16 aa, synthetic construct
  REGION 1..16: note = Description of Artificial Sequence: Synthetic peptide
TINSGGFTNYADSVKG

SEQ ID NO: 906 - protein, 16 aa, synthetic construct
  REGION 1..16: note = Description of Artificial Sequence: Synthetic peptide
DMSSGGTTNYADFVKG

SEQ ID NO: 907 - protein, 16 aa, synthetic construct
  REGION 1..16: note = Description of Artificial Sequence: Synthetic peptide
DMSSGGTTNYADFVKG

SEQ ID NO: 908 - protein, 16 aa, synthetic construct
  REGION 1..16: note = Description of Artificial Sequence: Synthetic peptide
GINRSGFTYYTDSVKG

SEQ ID NO: 909 - protein, 16 aa, synthetic construct
  REGION 1..16: note = Description of Artificial Sequence: Synthetic peptide
GINRSGFTYYTDSVKG

SEQ ID NO: 910 - protein, 16 aa, synthetic construct
  REGION 1..16: note = Description of Artificial Sequence: Synthetic peptide
RIDPGGTTTYADPVKG

SEQ ID NO: 911 - protein, 17 aa, synthetic construct
  REGION 1..17: note = Description of Artificial Sequence: Synthetic peptide
SINWSGGSTSYADSVKG

SEQ ID NO: 912 - protein, 17 aa, synthetic construct
  REGION 1..17: note = Description of Artificial Sequence: Synthetic peptide
TIASFPSRTNYVDSVKG

SEQ ID NO: 913 - protein, 16 aa, synthetic construct
  REGION 1..16: note = Description of Artificial Sequence: Synthetic peptide
FITIGGNTNYLDSVKG

SEQ ID NO: 914 - protein, 16 aa, synthetic construct
  REGION 1..16: note = Description of Artificial Sequence: Synthetic peptide
TINIGGSTDYADSVKG

SEQ ID NO: 915 - protein, 16 aa, synthetic construct
  REGION 1..16: note = Description of Artificial Sequence: Synthetic peptide
TISRGGTTNYSDSVKG

SEQ ID NO: 916 - protein, 16 aa, synthetic construct
  REGION 1..16: note = Description of Artificial Sequence: Synthetic peptide
RITGGGTTVYADSVKG

SEQ ID NO: 917 - protein, 16 aa, synthetic construct
  REGION 1..16: note = Description of Artificial Sequence: Synthetic peptide
SISPLGTTSYSGSVEG

SEQ ID NO: 918 - protein, 17 aa, synthetic construct
  REGION 1..17: note = Description of Artificial Sequence: Synthetic peptide
CISRRDDSTYYADSVKG

SEQ ID NO: 919 - protein, 16 aa, synthetic construct
  REGION 1..16: note = Description of Artificial Sequence: Synthetic peptide
TISAGGSTTYVDSVKD

SEQ ID NO: 920 - protein, 16 aa, synthetic construct
  REGION 1..16: note = Description of Artificial Sequence: Synthetic peptide
EICRDGTTYYTDSVKG

SEQ ID NO: 921 - protein, 16 aa, synthetic construct
  REGION 1..16: note = Description of Artificial Sequence: Synthetic peptide
QIMSGGGTNYAGSVKG

SEQ ID NO: 922 - protein, 16 aa, synthetic construct
  REGION 1..16: note = Description of Artificial Sequence: Synthetic peptide
EITRGGTTNYADSVQG

SEQ ID NO: 923 - protein, 11 aa, synthetic construct
  REGION 1..11: note = Description of Artificial Sequence: Synthetic peptide
TFLRSDGHHTI

SEQ ID NO: 924 - protein, 11 aa, synthetic construct
  REGION 1..11: note = Description of Artificial Sequence: Synthetic peptide
TFVRSDGHHTI

SEQ ID NO: 925 - protein, 11 aa, synthetic construct
  REGION 1..11: note = Description of Artificial Sequence: Synthetic peptide
TFLRSDGHHTI

SEQ ID NO: 926 - protein, 11 aa, synthetic construct
  REGION 1..11: note = Description of Artificial Sequence: Synthetic peptide
TFVRSDGHHTI

SEQ ID NO: 927 - protein, 11 aa, synthetic construct
  REGION 1..11: note = Description of Artificial Sequence: Synthetic peptide
TFLRSDGQHSI

SEQ ID NO: 928 - protein, 15 aa, synthetic construct
  REGION 1..15: note = Description of Artificial Sequence: Synthetic peptide
DLTFGLASSHYQYDY

SEQ ID NO: 929 - protein, 15 aa, synthetic construct
  REGION 1..15: note = Description of Artificial Sequence: Synthetic peptide
DLTFGLASSHYQYDY

SEQ ID NO: 930 - protein, 15 aa, synthetic construct
  REGION 1..15: note = Description of Artificial Sequence: Synthetic peptide
DLTFGLASSHYQYDY

SEQ ID NO: 931 - protein, 15 aa, synthetic construct
  REGION 1..15: note = Description of Artificial Sequence: Synthetic peptide
DLTFGLASSHYQYDY

SEQ ID NO: 932-935 - skipped (4 entries)

SEQ ID NO: 936 - protein, 11 aa, synthetic construct
  REGION 1..11: note = Description of Artificial Sequence: Synthetic peptide
GYLTSLGPKNY

SEQ ID NO: 937 - protein, 11 aa, synthetic construct
  REGION 1..11: note = Description of Artificial Sequence: Synthetic peptide
GYLTSLGPKNY

SEQ ID NO: 938 - protein, 11 aa, synthetic construct
  REGION 1..11: note = Description of Artificial Sequence: Synthetic peptide
LYLTSLGPKSY

SEQ ID NO: 939-941 - skipped (3 entries)

SEQ ID NO: 942 - protein, 11 aa, synthetic construct
  REGION 1..11: note = Description of Artificial Sequence: Synthetic peptide
TFLRSDGQPPI

SEQ ID NO: 943 - protein, 11 aa, synthetic construct
  REGION 1..11: note = Description of Artificial Sequence: Synthetic peptide
TFLRSDGQPPI

SEQ ID NO: 944 - protein, 14 aa, synthetic construct
  REGION 1..14: note = Description of Artificial Sequence: Synthetic peptide
AGRTGPPSYDAFNN

SEQ ID NO: 945 - protein, 14 aa, synthetic construct
  REGION 1..14: note = Description of Artificial Sequence: Synthetic peptide
AGRTGPPSYDAFNN

SEQ ID NO: 946 - protein, 14 aa, synthetic construct
  REGION 1..14: note = Description of Artificial Sequence: Synthetic peptide
GGLYFSNAYTQGDY

SEQ ID NO: 947 - protein, 14 aa, synthetic construct
  REGION 1..14: note = Description of Artificial Sequence: Synthetic peptide
GGLYFSNAYTQGDY

SEQ ID NO: 948 - protein, 11 aa, synthetic construct
  REGION 1..11: note = Description of Artificial Sequence: Synthetic peptide
IILLSGGPKDY

SEQ ID NO: 949 - protein, 11 aa, synthetic construct
  REGION 1..11: note = Description of Artificial Sequence: Synthetic peptide
AVLTNKPSWNF

SEQ ID NO: 950 - protein, 10 aa, synthetic construct
  REGION 1..10: note = Description of Artificial Sequence: Synthetic peptide
DLASIPTKTY

SEQ ID NO: 951 - protein, 12 aa, synthetic construct
  REGION 1..12: note = Description of Artificial Sequence: Synthetic peptide
NPPLILTAGGLY

SEQ ID NO: 952 - protein, 13 aa, synthetic construct
  REGION 1..13: note = Description of Artificial Sequence: Synthetic peptide
KLRVSGPTGPNVY

SEQ ID NO: 953 - protein, 10 aa, synthetic construct
  REGION 1..10: note = Description of Artificial Sequence: Synthetic peptide
PLTDYGMGYN

SEQ ID NO: 954 - protein, 12 aa, synthetic construct
  REGION 1..12: note = Description of Artificial Sequence: Synthetic peptide
MVRHPSGSTYEY

SEQ ID NO: 955 - protein, 11 aa, synthetic construct
  REGION 1..11: note = Description of Artificial Sequence: Synthetic peptide
IQVTNVGPRVY

SEQ ID NO: 956 - protein, 15 aa, synthetic construct
  REGION 1..15: note = Description of Artificial Sequence: Synthetic peptide
TPRSYTLRCLGKFDF

SEQ ID NO: 957 - protein, 13 aa, synthetic construct
  REGION 1..13: note = Description of Artificial Sequence: Synthetic peptide
GSILTNRGAIPGS

SEQ ID NO: 958 - protein, 19 aa, synthetic construct
  REGION 1..19: note = Description of Artificial Sequence: Synthetic peptide
DRRRYYCSGNRAFSSDYYY

SEQ ID NO: 959 - protein, 11 aa, synthetic construct
  REGION 1..11: note = Description of Artificial Sequence: Synthetic peptide
AQITSWGPKVY

SEQ ID NO: 960 - protein, 14 aa, synthetic construct
  REGION 1..14: note = Description of Artificial Sequence: Synthetic peptide
QTFPTFSRPTGLDY

SEQ ID NO: 961 - protein, 119 aa, synthetic construct
  REGION 1..119: note = Description of Artificial Sequence: Synthetic polypeptide
QVQLQESGGGLVQAGGSLRLSCAASGFIFRAASMAWYRQSPGNERELVASISSGAFTNYADSVKARFTISRDNAKNTVYLQMNSLKPEDTAVYFCGATFLRSDGHHTINGQGTQVTVSS

SEQ ID NO: 962 - protein, 119 aa, synthetic construct
  REGION 1..119: note = Description of Artificial Sequence: Synthetic polypeptide
QVQLQESGGGLVQAGGSLRLSCAASGFIFRAASMGWFRQSPGNERELVATVSSGDFTNYADSVKGRFTISRDNAKNTVYLQMNSLKPEDTAVYFCGATFVRSDGHHTIYGQGTQVTVSS

SEQ ID NO: 963 - protein, 119 aa, synthetic construct
  REGION 1..119: note = Description of Artificial Sequence: Synthetic polypeptide
QVQLQESGGGLVQAGGSLRLSCAASGFIFRAASMDWYRQFPGNERESIATISSGGFTNYADSVKGRFTISRDNAKNTVYLQMNSLKPEDTAVYFCGATFLRSDGHHTINGQGTQVTVSS

SEQ ID NO: 964 - protein, 119 aa, synthetic construct
  REGION 1..119: note = Description of Artificial Sequence: Synthetic polypeptide
QVQLQESGGGLVQAGGSLRLSCAASGFIFRAASMGWFRQSPGNERELVATVSSGGFTNYADSVKGRFTISRDNAKNTVYLQMNSLKPEDTAVYFCGATFVRSDGHHTIYGQGTQVTVSS

SEQ ID NO: 965 - protein, 119 aa, synthetic construct
  REGION 1..119: note = Description of Artificial Sequence: Synthetic polypeptide
QVQLQESGGGLVQAGGSLRLSCAASGFIFRAASMDWYRQSPGTQPELVATISSTGFTNYANSVKGRFTISRDNAKNTVYLQMNSLKPEDTAVYFCGATFLRSDGQHSIYGQGTQVTVSS

SEQ ID NO: 966 - protein, 124 aa, synthetic construct
  REGION 1..124: note = Description of Artificial Sequence: Synthetic polypeptide
QVQLQESGGGLVHTGGSLRLSCAASGDTFLRYAMGWFRQAPGKEREFVAAITWNGGNTDYAGSLKGRFTISRDNTKNTVYLQMNSLKPEDTAVYYCAADLTFGLASSHYQYDYWGQGTQVTVSS

SEQ ID NO: 967 - protein, 124 aa, synthetic construct
  REGION 1..124: note = Description of Artificial Sequence: Synthetic polypeptide
QVQLQESGGGLVQAGGSLRLSCAASGDTFLRYAMGWFRQAPGKEREFVAAITWNGGNTDYAGSLKGRFTISRDNTKNTVYLQMNSLKPEDTAVYYCAADLTFGLASSHYQYDYWGQGTQVTVSS

SEQ ID NO: 968 - protein, 124 aa, synthetic construct
  REGION 1..124: note = Description of Artificial Sequence: Synthetic polypeptide
QVQLQESGGGLVHTGGSLRLSCAFSGDTFLRYAMGWFRQAPGKEREFVAAITWNGGNTDYADSLKGRFTISRDNTKNTVYLQMNSLRPEDTAVYYCAADLTFGLASSHYQYDYWGQGTQVTVSS

SEQ ID NO: 969 - protein, 124 aa, synthetic construct
  REGION 1..124: note = Description of Artificial Sequence: Synthetic polypeptide
QVQLQESGGGLVQPGGSLRLSCAASGDTFLRYAMGWFRQAPGKEREFVAAITWNGGNTDYAGSLKGRFTISRDNTKNTVYLQMNSLKPEDTAVYYCAADLTFGLASSHYQYDYWGQGTQVTVSS

SEQ ID NO: 970 - protein, 112 aa, synthetic construct
  REGION 1..112: note = Description of Artificial Sequence: Synthetic polypeptide
QVQLQESGGGSVLAGGSLRLSCAASGFTFSSYYMSWVRQAPGKGLEWVSGIHYTGDWTNYADSVKGRFTISRDNAKNELYLEMNNLKPEDTAVYYCARGSDKGQGTQVTVSS

SEQ ID NO: 971 - protein, 112 aa, synthetic construct
  REGION 1..112: note = Description of Artificial Sequence: Synthetic polypeptide
QVQLQESGGGSVQAGGSLRLSCAASGFTFSSYYMSWVRQAPGKGLEWVSGIHYTGDWTNYADSVKGRFTISRDNAKNELYLEMNNLKPEDTAVYYCARGSDKGQGTQVTVSS

SEQ ID NO: 972 - protein, 112 aa, synthetic construct
  REGION 1..112: note = Description of Artificial Sequence: Synthetic polypeptide
QVQLQESGGGLVQPGGSLRLSCAASGFTFSDWAMSWVRQAPGKGLEWVSGIHYGDHTTHYADFVKGRFTISRDDAKNTLYLQMNSLKPEDTAVYYCARGSTKGQGTQVTVSS

SEQ ID NO: 973 - protein, 112 aa, synthetic construct
  REGION 1..112: note = Description of Artificial Sequence: Synthetic polypeptide
QVQLQESGGGLVQPGGSLRLSCAASGFTFSDWAMSWVRQAPGKGLEWVSSIHYGDHTTHYADFVKGRFTISRDDAKNTLYLQMNSLKPEDTAVYYCEKGTTRGQGTQVTVSS

SEQ ID NO: 974 - protein, 119 aa, synthetic construct
  REGION 1..119: note = Description of Artificial Sequence: Synthetic polypeptide
QVQLQESGGGLVQAGGSLKLSCAASGNVFRAATMAWYRQAPEKQREMVATIASGGTTNYADFVKGRFTISRDNAKNTVYLQMNTLKPEDTAVYYCNAGYLTSLGPKNYWGQGTQVTVSS

SEQ ID NO: 975 - protein, 119 aa, synthetic construct
  REGION 1..119: note = Description of Artificial Sequence: Synthetic polypeptide
  VARIANT 44: note = MOD_RES - Any amino acid
QVQLQESGGGLVQPGGSLRLSCAASGNVFRAATMAWYRQAPEKXREMVATIASGGTTNYADFVKGRFTISRDNAKNTVYLQMNTLKPEDTAVYYCNAGYLTSLGPKNYWGQGTQVTVSS

SEQ ID NO: 976 - protein, 119 aa, synthetic construct
  REGION 1..119: note = Description of Artificial Sequence: Synthetic polypeptide
QVQLQESGGGLVQAGGSLRLSCAASGNVFRAATMAWYRQVPEKQREMVATIASGGTTNYADFVKGRFTISRDNAKNTVYLQMNTLKPEDTAVYYCNALYLTSLGPKSYWGQGTQVTVSS

SEQ ID NO: 977 - protein, 111 aa, synthetic construct
  REGION 1..111: note = Description of Artificial Sequence: Synthetic polypeptide
QVQLQESGGGLVQPGGSLRLSCAASGFAFGNHWMYWYRQAPGRGRELVASISSGGSTNYVDSVKGRFTISRDNARNTVYLQMYSLKPEDTAVYYCGTSDNWGQGTQVTVSS

SEQ ID NO: 978 - protein, 111 aa, synthetic construct
  REGION 1..111: note = Description of Artificial Sequence: Synthetic polypeptide
QVQLQESGGGLVQAGGSLRLSCAASGFAFGNHWMYWYRQAPGRGRELVASISSGGSTNYVDSVKGRFTISRDNARNTVYLQMYSLRPEDTAVYYCGTSDNWGQGTQVTVSS

SEQ ID NO: 979 - protein, 111 aa, synthetic construct
  REGION 1..111: note = Description of Artificial Sequence: Synthetic polypeptide
QVQLQESGGGLVQAGGSLRLSCAASGFAFGNHWMYWYRQAPGRGRELVASISSGGSTNYVDSVKGRFTISRDNARNTVYLQMYSLKPEDTAVYYCGTSDNWGQGTQVTVSS

SEQ ID NO: 980 - protein, 119 aa, synthetic construct
  REGION 1..119: note = Description of Artificial Sequence: Synthetic polypeptide
QVQLQESGGGLVQAGGSLRLSCAASGFIFRAASISWYRQSPGNERELVATINSGGFTNYADSVLGRFTISRDNAKNTGYLQMNSLKPEDTAVYFCAATFLRSDGQPPIWGQGTQVTVSS

SEQ ID NO: 981 - protein, 119 aa, synthetic construct
  REGION 1..119: note = Description of Artificial Sequence: Synthetic polypeptide
QVQLQESGGGLVQAGGSLRLSCAASGFIFRAASMGWYRQSPGNERELVATINSGGFTNYADSVKGRFTISRDNAKNTGYLQMNSLKPEDTAVYFCAATFLRSDGQPPIWGQGTQVTVSS

SEQ ID NO: 982 - protein, 122 aa, synthetic construct
  REGION 1..122: note = Description of Artificial Sequence: Synthetic polypeptide
QVQLQESGGGLVQAGGSLRLSCAASEYILSMYRMAWYRQAPGKVRELVADMSSGGTTNYADFVKGRFTISRDNDRNTVYLQMNRLQPEDTAAYYCNVAGRTGPPSYDAFNNWGQGTQVTVSS

SEQ ID NO: 983 - protein, 122 aa, synthetic construct
  REGION 1..122: note = Description of Artificial Sequence: Synthetic polypeptide
QVQLQESGGGLVQPGASLRVSCAASEYILSMYRMAWYRQAPGKVRELVADMSSGGTTNYADFVKGRFTISRDNDRNTVYLQMNRLQPEDTAAYYCNVAGRTGPPSYDAFNNWGQGTQVTVSS

SEQ ID NO: 984 - protein, 122 aa, synthetic construct
  REGION 1..122: note = Description of Artificial Sequence: Synthetic polypeptide
QVQLQESGGGLVQPGGSLRLSCAASESISSFIAVGWYRQAPGKERELVAGINRSGFTYYTDSVKGRFSISRDNAKNTVLLQMTSLKPEDTAVYYCNAGGLYFSNAYTQGDYWGQGTQVTVSS

SEQ ID NO: 985 - protein, 122 aa, synthetic construct
  REGION 1..122: note = Description of Artificial Sequence: Synthetic polypeptide
QVQLQESGGGLVQTGGSLRLSCAASESISSFIAVGWYRQAPGKERELVAGINRSGFTYYTDSVKGRFSISRDNAKNTVLLQMTSLKPEDTAVYYCNAGGLYFSNAYTQGDYWGQGTQVTVSS

SEQ ID NO: 986 - protein, 119 aa, synthetic construct
  REGION 1..119: note = Description of Artificial Sequence: Synthetic polypeptide
QVQLQESGGGLVQAGGSLRLSCAASGSVFRANVMGWYRQAPGKQHELVARIDPGGTTTYADPVKGRFTISRDNAKKTVYLQMNSLKPDDTAVYYCNAIILLSGGPKDYWGQGTQVTVSS

SEQ ID NO: 987 - protein, 120 aa, synthetic construct
  REGION 1..120: note = Description of Artificial Sequence: Synthetic polypeptide
QVQLQESGGGLVQAGGSLRLSCAPSGRTSSIFGMGWFRQAPGKEREFVASINWSGGSTSYADSVKGRFTISRDNAKNEMYLQMNSLKFEDTAVYVCAAAVLTNKPSWNFWGQGTQVTVSS

SEQ ID NO: 988 - protein, 121 aa, synthetic construct
  REGION 1..121: note = Description of Artificial Sequence: Synthetic polypeptide
QVQLQESGGGLVQAGGSLRLSCAASGPIFSDTIRTMGWYRQAAGKQRELVATIASFPSRTNYVDSVKGRFTISRDIAKNTVYLQMDSLKPEDTAVYYCNVDLASIPTKTYWGQGTQVTVSS

SEQ ID NO: 989 - protein, 120 aa, synthetic construct
  REGION 1..120: note = Description of Artificial Sequence: Synthetic polypeptide
QVQLQESGGGLVQAGGSLRLSCAASGSIFGINAMGWYRQAPGKQRESVAFITIGGNTNYLDSVKGRFTISRDNAKNTVYLQMNGLKPEDTAVYYCNTNPPLILTAGGLYWGQGTQVTVSS

SEQ ID NO: 990 - protein, 121 aa, synthetic construct
  REGION 1..121: note = Description of Artificial Sequence: Synthetic polypeptide
QVQLQESGGGLVQPGGSLRLSCATSANRFNINVMGWYRQAPGQQRELVATINIGGSTDYADSVKGRFTISRDNAKNTVYLQLSDLKPEDTAVYYCNVKLRVSGPTGPNVYWGQGTQVTVSS

SEQ ID NO: 991 - protein, 116 aa, synthetic construct
  REGION 1..116: note = Description of Artificial Sequence: Synthetic polypeptide
QVQLQESGGGLVQAGGSLKLSCTASGTILSTMAWYRQAPGKQRELVATISRGGTTNYSDSVKGRFAISRDSTKNTVYLQMNSLKPEDTAVYYCNTPLTDYGMGYNWGQGTQVTVSS

SEQ ID NO: 992 - protein, 120 aa, synthetic construct
  REGION 1..120: note = Description of Artificial Sequence: Synthetic polypeptide
QVQLQESGGGLVQAGGSLRLSCAVSGSIFSLNTLAWYRQAPGRQRDLIARITGGGTTVYADSVKGRFTISRDNAKNTVYLQMNSLKPEDTAVYYCNLMVRHPSGSTYEYWGQGTQVTVSS

SEQ ID NO: 993 - protein, 119 aa, synthetic construct
  REGION 1..119: note = Description of Artificial Sequence: Synthetic polypeptide
QVQLQESGGGLVQAGGSLRLSCAASGIIFRGTTMGWFRQAPGKQRESVASISPLGTTSYSGSVEGRFTVSRDNAKNTLFLQMNSLKSEDTAVYYCNAIQVTNVGPRVYWGQGTQVTVSS

SEQ ID NO: 994 - protein, 124 aa, synthetic construct
  REGION 1..124: note = Description of Artificial Sequence: Synthetic polypeptide
QVQLQESGGGLVQPGGSLRLSCASSGFTLDDYTIGWFRQAPGKEREGVSCISRRDDSTYYADSVKGRFTISRDNAKNTVDLQMISLRPEDTAVYYCAATPRSYTLRCLGKFDFQGQGTQVTVSS

SEQ ID NO: 995 - protein, 121 aa, synthetic construct
  REGION 1..121: note = Description of Artificial Sequence: Synthetic polypeptide
QVQLQESGGGLVQAGGSLRLSCAASGNIVRMTNMAWYRQAPGKQREFVATISAGGSTTYVDSVKDRFTISRDNTKNTVYLQMNYLKPEDTAVYYCATGSILTNRGAIPGSWGHGTQVTVSS

SEQ ID NO: 996 - protein, 127 aa, synthetic construct
  REGION 1..127: note = Description of Artificial Sequence: Synthetic polypeptide
QVQLQESGGGLVQAGGSLRLSCAAPGFAFNDHAILWFRQAPGKEREGVSEICRDGTTYYTDSVKGRFTISSDNAKNTVYLQMNSVKTDDTAVYYCAVDRRRYYCSGNRAFSSDYYYWGQGTQVTVSS

SEQ ID NO: 997 - protein, 119 aa, synthetic construct
  REGION 1..119: note = Description of Artificial Sequence: Synthetic polypeptide
QVQLQESGGGLVQAGGSLRLSCVHSGSIFRASTMAWYRQAPGKQRELVAQIMSGGGTNYAGSVKGRFTISRDNANNTVYLQMNSLKPEDTAVYYCNAAQITSWGPKVYWGQGTQVTVSS

SEQ ID NO: 998 - protein, 122 aa, synthetic construct
  REGION 1..122: note = Description of Artificial Sequence: Synthetic polypeptide
QVQLQESGGGLVQPGGSLRLSCAASGRINSINTMGWYRQAPGNQRELVAEITRGGTTNYADSVQGRYAISRDNAKNLVYLQMNSLKPEDTDVYYCNAQTFPTFSRPTGLDYWGQGTQVTVSS

SEQ ID NO: 999 - protein, 111 aa, synthetic construct
  REGION 1..111: note = Description of Artificial Sequence: Synthetic polypeptide
EVQLVESGGGLVQPGGSLTLSCAASGFAFGNHWMYWYRQAPGRGRELVASISSGGSTNYVDSVKGRFTISRDNAKNTLYLQMNSLRAEDTAVYYCGTSDNWGQGTLVTVSS

SEQ ID NO: 1000 - protein, 119 aa, synthetic construct
  REGION 1..119: note = Description of Artificial Sequence: Synthetic polypeptide
EVQLLESGGGLVQPGGSLTLSCAASGFIFRAASMDWYRQFPGNERESIATISSGGFTNYADSVKGRFTISRDNSKNTLYLQMNSLRAEDTAVYYCGATFLRSDGHHTINGQGTLVTVSS

SEQ ID NO: 1001 - protein, 119 aa, synthetic construct
  REGION 1..119: note = Description of Artificial Sequence: Synthetic polypeptide
EVQLLESGGGLVQPGGSLTLSCAASGFIFRAASMAWYRQSPGNERELVASISSGAFTNYADSVKARFTISRDNSKNTLYLQMNSLRAEDTAVYYCGATFLRSDGHHTINGQGTLVTVSS

SEQ ID NO: 1002 - protein, 119 aa, synthetic construct
  REGION 1..119: note = Description of Artificial Sequence: Synthetic polypeptide
EVQLLESGGGLVQPGGSLTLSCAASGFIFRAASMDWYRQFPGNERESIATISSGGFTNYADSVKGRFTISRDNSKNTLYLQMNSLRAEDTAVYYCGATFLRSDGHHTIWGQGTLVTVSS

SEQ ID NO: 1003 - protein, 119 aa, synthetic construct
  REGION 1..119: note = Description of Artificial Sequence: Synthetic polypeptide
EVQLLESGGGLVQPGGSLTLSCAASGFIFRAASMAWYRQSPGNERELVASISSGAFTNYADSVKARFTISRDNSKNTLYLQMNSLRAEDTAVYYCGATFLRSDGHHTIWGQGTLVTVSS

SEQ ID NO: 1004 - protein, 111 aa, synthetic construct
  REGION 1..111: note = Description of Artificial Sequence: Synthetic polypeptide
QVQLQESGGGLVQAGGSLRLSCAASGVTFSINYIDWYRQAPGKQREWVAQITRDSNSFYADSVKGRFAISRDNAKNTVYLQMNNLKPEDTAVYYCRVLSYWGQGTQVTVSS

SEQ ID NO: 1005 - protein, 111 aa, synthetic construct
  REGION 1..111: note = Description of Artificial Sequence: Synthetic polypeptide
QVQLQESGGGLVQAGGSLRLSCEASGPTFSINYIDWYRQAPGKQREWVAQITRDSNSFYADSVKGRFAVSRDNAKNTVYLQMNSLKPEDTAVYYCRVLSYWGQGTQVTVSS

SEQ ID NO: 1006 - protein, 111 aa, synthetic construct
  REGION 1..111: note = Description of Artificial Sequence: Synthetic polypeptide
QVQLQESGGGLVQAGGSLRLSCAASGVTFSINYIDWYRQAPGKQREWVAQITRDSNSFYADSVKGRFAISRDNAKNTVYLQMNSLKPEDTAVYYCRVLSYWGQGTQVTVSS

SEQ ID NO: 1007 - protein, 111 aa, synthetic construct
  REGION 1..111: note = Description of Artificial Sequence: Synthetic polypeptide
QVQLQESGGGLVQAGGSLRLSCAASGSTFSRNYIDWYRQAPGKQREWVAQITSGGNTHYEPSLKGRFTISRDNAKNTAYLQMNSLKPEDTAVYYCRILDYWGQGTQVTVSS

SEQ ID NO: 1008 - protein, 111 aa, synthetic construct
  REGION 1..111: note = Description of Artificial Sequence: Synthetic polypeptide
QVQLQESGGGLVQAGGSLRLSCAASGVTFSASYIDWYRQAPGNEREWVAQITRGGDSFYADSVKGRFAISRDNAKNTVYLQMNSLKPEDTAVYYCRVLSYWGQGTQVTVSS

SEQ ID NO: 1009 - protein, 111 aa, synthetic construct
  REGION 1..111: note = Description of Artificial Sequence: Synthetic polypeptide
QVQLQESGGGLVQAGGSLRLSCAASGSTFNNYAMDWFRQAPGKQREWVAQITRDSSSFYADSVKGRFAISRDNAKNTVYLQMNSLKPEDTAVYYCRVLSYWGQGTQVTVSS

SEQ ID NO: 1010 - protein, 111 aa, synthetic construct
  REGION 1..111: note = Description of Artificial Sequence: Synthetic polypeptide
QVQLQESGGGLVQAGGSLRLSCAASGVTFSINYIDWYRQAPGKQREWVAQITRDSNSFYADSVKGRFAISRDNAKNTVYLQMNSLKPEDTAVYYCRLLSYWGQGTQVTVSS

SEQ ID NO: 1011 - protein, 111 aa, synthetic construct
  REGION 1..111: note = Description of Artificial Sequence: Synthetic polypeptide
QVQLQESGGGLVQAGGSLRLSCAASGVTFSINYIDWYRQAPGKQREWVAQITRDDTSFYADSVKGRFAISRDNAKNTVYLQMNNLRPEDTAVYYCRLLSFWGQGTQVTVSS

SEQ ID NO: 1012 - protein, 111 aa, synthetic construct
  REGION 1..111: note = Description of Artificial Sequence: Synthetic polypeptide
QVQLQESGGGLVQPGGSLRLSCAASGSTFGRNYIDWYRQAPGKQREWVAQITSGGNTHYEPSLKGRFTISRDNAKNTAYLQMNSLKPEDTAVYYCRILDYWGQGTQVTVSS

SEQ ID NO: 1013 - protein, 111 aa, synthetic construct
  REGION 1..111: note = Description of Artificial Sequence: Synthetic polypeptide
QVQLQESGGGLVQAGGSLRLSCKASGVTFSINYIDWYRQAPGKQREWVAQITRDGSSFYADSVKGRFAISRDNAKNTVYLQMNSLKPEDTAVYYCRILSDWGQGTQVTVSS

SEQ ID NO: 1014 - protein, 111 aa, synthetic construct
  REGION 1..111: note = Description of Artificial Sequence: Synthetic polypeptide
QVQLQESGGGLVQAGDSLRLSCAASGVTFSASYIDWYRQAPGNEREWVAQITRGGDSFYADSVKGRFAISRDNAKNTVYLQMNSLKPEDTAVYYCRVLSYWGQGTQVTVSS

SEQ ID NO: 1015 - protein, 111 aa, synthetic construct
  REGION 1..111: note = Description of Artificial Sequence: Synthetic polypeptide
QVQLQESGGGLVQPGGSLRLSCAASGVTFSINYIDWYRQAPGKQREWVAQITRDSNSFYADSVKGRFAISRENAKNTVYLQMNSLKPEDTAVYYCRVLSYWGQGTQVTVSS

SEQ ID NO: 1016 - protein, 111 aa, synthetic construct
  REGION 1..111: note = Description of Artificial Sequence: Synthetic polypeptide
QVQLQESGGGLVQAGGSLRLSCQASGVTFNINYIDWYRQAPGRQREWVAQITRDSTRFYADSVKGRFAISRDNAKNMVYLQLNSLKPEDTAVYYCRILSYWGQGTQVTVSS

SEQ ID NO: 1017 - protein, 111 aa, synthetic construct
  REGION 1..111: note = Description of Artificial Sequence: Synthetic polypeptide
QVQLQESGGGLVQPGGSLRLSCAASGFDFSISYIDWYRQAPGNEREWVAQITRGGDSFYADSVKGRFAISRDNAKNTVYLQMNSLKPEDTAVYYCRILSYWGQGTQVTVSS

SEQ ID NO: 1018 - protein, 111 aa, synthetic construct
  REGION 1..111: note = Description of Artificial Sequence: Synthetic polypeptide
QVQLQESGGGLVQAGGSLRLSCAASGSTFSRNYIDWYRQAPGKQREWVAQITSAGNTHYEPSLKGRFTISRDNAKNTAYLQMNSLKPEDTAVYYCRILDYWGQGTQVTVSS

SEQ ID NO: 1019 - protein, 111 aa, synthetic construct
  REGION 1..111: note = Description of Artificial Sequence: Synthetic polypeptide
QVQLQESGGGLVQPGGSLRLSCAASGVTFSISYIDWYRQAPGNEREWVAQITRGGDSFYADSVKGRFAISRDNAKNTVYLQMNSLKPEDTAVYYCRILSYWGQGTQVTVSS

SEQ ID NO: 1020 - protein, 111 aa, synthetic construct
  REGION 1..111: note = Description of Artificial Sequence: Synthetic polypeptide
QVQLQESGGGLVQAGGSLRLSCAASGVTFSINYIDWYRQAPGKQREWVAQITRDSNSFYADSVKGRFAVSRDNAKNTVYLQMNSLKPEDTAVYYCRVLSYWGQGTQVTVSS

SEQ ID NO: 1021 - protein, 111 aa, synthetic construct
  REGION 1..111: note = Description of Artificial Sequence: Synthetic polypeptide
QVQLQESGGGLVQPGGSLTLSCAASGSTFSRNYIDWYRQAPGKQREWVAQITSGGNTHYEPSLKGRFTISRDNAKNTAYLQMNSLKPEDTAVYYCRILDYWGQGTQVTVSS

SEQ ID NO: 1022 - protein, 111 aa, synthetic construct
  REGION 1..111: note = Description of Artificial Sequence: Synthetic polypeptide
QVQLQESGGGLVQAGGSLRLSCAASGSTFSKNYIDWYRQAPGKQREWVAQITSGGNTHYEPSLKGRFTISRDNAKNTAYLQMNSLKPEDTAVYYCRILDYWGQGTQVTVSS

SEQ ID NO: 1023 - protein, 111 aa, synthetic construct
  REGION 1..111: note = Description of Artificial Sequence: Synthetic polypeptide
QVQLQESGGGLVQAGGSLRLSCAASGSTSSRNYIDWYRQAPGKQREWVAQITSGGNTHYEPSLKGRFTISRDNAKNTAYLQMNSLKPEDTAVYYCRILDYWGQGTQVTVSS

SEQ ID NO: 1024 - protein, 111 aa, synthetic construct
  REGION 1..111: note = Description of Artificial Sequence: Synthetic polypeptide
QVQLQESGGGLVQAGGSLRLSCSASGSTFSRNYIDWYRQAPGKQREWVAQITSGGNTHYEPSLKGRFTISRDNAKNTAYLQMNSLKPEDTAVYYCRILDYWGQGTQVTVSS

SEQ ID NO: 1025 - protein, 111 aa, synthetic construct
  REGION 1..111: note = Description of Artificial Sequence: Synthetic polypeptide
QVQLQESGGGLVQPGDPLRLSCAASGSTFSRNYIDWYRQAPGKQREWVAQITSGGNTHYEPSLKGRFTISRDNAKNTAYLQMNSLKPEDTAVYYCRILDYWGQGTQVTVSS

SEQ ID NO: 1026 - protein, 125 aa, synthetic construct
  REGION 1..125: note = Description of Artificial Sequence: Synthetic polypeptide
QVQLQESGGGLVQAGGSLRLSCAVSGRTFSGFGTGWFRQAPGKEREFVAAISWAGGRTHYEDSVKGRFTIHRDNAKNTVYLQMNSLKPEDTAVYYCAAQVSRAYDGIWYSGGDYWGQGTQVTVSS

SEQ ID NO: 1027 - protein, 125 aa, synthetic construct
  REGION 1..125: note = Description of Artificial Sequence: Synthetic polypeptide
QVQLQESGGGLVQAGGSLRLSCAVSGRTFSGFGTGWFRQAPGKEREFVAAISWDGGRTHYADFVKGRFTISRDNAKNTVYLQMNSLKPEDTAVYYCAAQVARAYDSKWYSGGDYWGQGTQVTVSS

SEQ ID NO: 1028 - protein, 125 aa, synthetic construct
  REGION 1..125: note = Description of Artificial Sequence: Synthetic polypeptide
QVQLQESGGGLVQAGGSLRLSCAVSGRTFSGFGTGWFRQAPGKEREFVAAISWVGGRTHYADSVKGRFTISRDNAKNTVYLQMNSLKPEDTAVYYCAAQVARAYDGNWYSGGDYWGQGTQVTVSS

SEQ ID NO: 1029 - protein, 125 aa, synthetic construct
  REGION 1..125: note = Description of Artificial Sequence: Synthetic polypeptide
QVQLQESGGGLVQAGGSLRLSCAVSGRTFSGFGTGWFRQAPGKEREFVAAISWSGGRTHYADSVKGRFTISRDNAKNTVYLQMNSLKPEDTAVYYCAGQVARAYDGNWYSRGDYWGQGTQVTVSS

SEQ ID NO: 1030 - protein, 125 aa, synthetic construct
  REGION 1..125: note = Description of Artificial Sequence: Synthetic polypeptide
QVQLQESGGGSVQAGGSLRLSCAFSGRTFSGFGTGWFRQAPEKEREFVAAISWDGGRTHYADSVKGRFTISRDNAKNTVYLQMDSLKPEDTAIYYCAAQVSRAYDGRWYSAVDYWGRGTQVTVSS

SEQ ID NO: 1031 - protein, 125 aa, synthetic construct
  REGION 1..125: note = Description of Artificial Sequence: Synthetic polypeptide
QVQLQESGGGLVQAGGSLRLSCAVSGRTFSGFGTGWFRQAPGKEREFVAAISWSGGTTHYADSVKGRFTISRDNAKNTVYLQMNSLKPEDTAVYYCAGQVARAYDSSWYSRGDYWGQGTQVTVSS

SEQ ID NO: 1032 - protein, 125 aa, synthetic construct
  REGION 1..125: note = Description of Artificial Sequence: Synthetic polypeptide
QVQLQESGGGLVQAGGSLGLSCAVSGRTFSGFGTGWFRQPPEKEREFVAAISWDGGRTHYADSVKGRFTISRDNAKNTVFLQMNSLKPEDTAVYYCAAQVARAYDSRWYSGGDYWGQGTQVTVSS

SEQ ID NO: 1033 - protein, 128 aa, synthetic construct
  REGION 1..128: note = Description of Artificial Sequence: Synthetic polypeptide
QVQLQESGGGLVQAGGSLRLSCAVSGRTFSGFGTGWFRQAPGKEREFVAAISWSGGTTHYADSVKGRFTISRDNAKNTVSLVYLQMNSLKPDDTAVYYCAGQVARAYDSSWYSRGDYLGQGTQVTVSS

SEQ ID NO: 1034 - protein, 125 aa, synthetic construct
  REGION 1..125: note = Description of Artificial Sequence: Synthetic polypeptide
QVQLQESGGGLVQAGGSLRLSCAVSGRTFSGFGTGWFRQAPGKEREFVAAISWDGGRTHYADSVKGRFTISRDNAANTVYLQMNSLKPEDTAVYYCAGQVSRAYDSMWYGRDDYWGQGTQVTVSS

SEQ ID NO: 1035 - protein, 128 aa, synthetic construct
  REGION 1..128: note = Description of Artificial Sequence: Synthetic polypeptide
QVQLQESGGGLVQAGGSLRLSCAVSGRTFSGFGTGWFRQAPGKEREFVAAISWSGGTTHYADSVKGRFTISRDNAKNTVNLVYLQMNDLRPEDTAVYYCAGQVARAYDSNWYSRGDYWGQGTQVTVSS

SEQ ID NO: 1036 - protein, 125 aa, synthetic construct
  REGION 1..125: note = Description of Artificial Sequence: Synthetic polypeptide
QVQLQESGGGLVQAGGSLRLSCAVSGRTFSGFGTGWFRQAPGKEREFVAAISWSGGTTHYADSVKGRFTISRDNAENTVYLEMNSLKPEDTAVYICAGQVSRAYDSNWYSRDDYWGQGTQVTVSS

SEQ ID NO: 1037 - protein, 125 aa, synthetic construct
  REGION 1..125: note = Description of Artificial Sequence: Synthetic polypeptide
QVQLQESGGGLVQAGGSLRLSCAVSGRTFSGFGTGWFRQAPEKEREFVAAISWDGGRTHYADSVKGRFTISRDNAKNTVYLQMNSLKPEDTAIYYCAGQVARAYDTRWYSRGDYWGQGTQVTVSS

SEQ ID NO: 1038 - protein, 125 aa, synthetic construct
  REGION 1..125: note = Description of Artificial Sequence: Synthetic polypeptide
QVQLQESGGGLVQAGGSLRLSCAVSGRTFSGFGTGWFRQAPGKEREFVAAISWDGGRTHYADFVKGRFTISRDNAKNTVYLQMNSLKPEDTAVYYCAAQVARAYDSRWYSGGDYWGQGTQVTVSS

SEQ ID NO: 1039 - protein, 125 aa, synthetic construct
  REGION 1..125: note = Description of Artificial Sequence: Synthetic polypeptide
QVQLQESGGGLVQAGGSLRLSCAVSGRTFSGFGTGWFRQAPGKEREFVAAVSWSGGTTEIADSVKGRFTISRDNAKNTVYLQMSSLKPGDTAVYYCAGQVARAYDSRWYSRGDYWGQGTQVTVSS

SEQ ID NO: 1040 - protein, 128 aa, synthetic construct
  REGION 1..128: note = Description of Artificial Sequence: Synthetic polypeptide
QVQLQESGGGLVQAGDSLRLSCAVSGRTFSGFGTGWFRQAPGKEREFVAAVSQSGGTTHYADSVKGRFTISRDNAKNTETLVYLQMNSLKPEDTAVYYCAGQVARAYDSSWYARGDYWGQGTQVTVSS

SEQ ID NO: 1041 - protein, 128 aa, synthetic construct
  REGION 1..128: note = Description of Artificial Sequence: Synthetic polypeptide
QVQLQESGGGLVQAGGSLRLSCAVSGRTFSGFGTGWFRQAPGKEREFVAAISWSGGTTHYADSVKGRFTISRDNAKNTVNLVYLQMNSLRPEDTAVYYCAGQVARAYDSNWYSRGDYWGQGTQVTVSS

SEQ ID NO: 1042 - protein, 125 aa, synthetic construct
  REGION 1..125: note = Description of Artificial Sequence: Synthetic polypeptide
QVQLQESGGGLVQAGGSLRLSCRFSGRTFSGFGTGWFRQAPGKEREFVAAISWAGGRTHYEDSVKGRFTISRDNAKNTVYLQMNSLKPEDTAVYYCAVQVSRAYDGIWYSGGDYWGQGTQVTVSS

SEQ ID NO: 1043 - protein, 127 aa, synthetic construct
  REGION 1..127: note = Description of Artificial Sequence: Synthetic polypeptide
QVQLQESGGGLVQAGGSLMVSCAASGGTWSSYATGWFRQVPGKERKLIAGISRSGGRTYYAESVKGRFTISRDNAKNTVYLQMNTLKPDDTAVYYCAAARYFTSSVVYTSGNDYDYWGQGTQVTVSS

SEQ ID NO: 1044 - protein, 127 aa, synthetic construct
  REGION 1..127: note = Description of Artificial Sequence: Synthetic polypeptide
QVQLQESGGGLVQAGGSLMVSCAASGGTWSSYATGWFRQVPGKERELIAGISRSGGRTYYAESVKGRFTISRDNAKNTVYLQMNTLKPDDTAVYYCAAARYFTSSVVYTSGNDYDYWGQGTQVTVSS

SEQ ID NO: 1045 - protein, 126 aa, synthetic construct
  REGION 1..126: note = Description of Artificial Sequence: Synthetic polypeptide
QVQLQESGGGLVQPGGSLRLSCAASGGTFSSYATGWFRQVPGKEREFIAGISRNSGRTYAESVKGRFTISRDNAKNTVYLQMNTLRPDDTAVYYCAAARYFTRDAIYTSGDDYDYWGQGTQVTASS

SEQ ID NO: 1046 - protein, 127 aa, synthetic construct
  REGION 1..127: note = Description of Artificial Sequence: Synthetic polypeptide
QVQLQESGGGLVQVGGSLMVSCAASGGTFSSYATGWFRQVPGKEREFIAGVSRNSGRTYYAESVKGRFTISRDNAKNTVYLQMNTLKPDDTGVYYCAAARYFTRDAVYTSGDDYDYWGQGTQVTVSS

SEQ ID NO: 1047 - protein, 127 aa, synthetic construct
  REGION 1..127: note = Description of Artificial Sequence: Synthetic polypeptide
QVQLQESGGGLVQLGDSLMVSCAASGGTFSSYATGWFRQVPGREREFIAGISRSGGRTYYAESVKGRFTISRDNAKNTVYLQMNTLKPDDTAVYYCAAARYFTTSVVYTSGDDYDYWGQGTQVTVSS

SEQ ID NO: 1048 - protein, 127 aa, synthetic construct
  REGION 1..127: note = Description of Artificial Sequence: Synthetic polypeptide
QVQLQESGGGLVQLGDSLMVSCAASGGTFSSYATGWFRQVPGKEREFIAGISRSGGRTYYAESVKGRFTISRDNAKNTVYLQMNTLKPDDTAVYYCAAARYFTTSVVYTSGDDYDYWGQGTQVTVSS

SEQ ID NO: 1049 - protein, 127 aa, synthetic construct
  REGION 1..127: note = Description of Artificial Sequence: Synthetic polypeptide
QVQLQESGGGLVQAGGSLMVSCAASGGTWSSYATGWFRQVPGKERELIAGISRSGGRTYYAESVKGRFTISRDNAKNTVYLQMNTLKSDDTAVYYCAAARYFTSSVVYTSGNDYDYWGQGTQVTVSS

SEQ ID NO: 1050 - protein, 127 aa, synthetic construct
  REGION 1..127: note = Description of Artificial Sequence: Synthetic polypeptide
QVQLQESGGGLVQVGGSLMVSCAASGGTFSSYATGWFRQVPGKEREFIAGISRNSGRTYYAESVKGRFTISRDNAKNTVYLQMNTLKPDDTAVYYCAAARYFTRDAVYTSGDDYDYWGQGTQVTVSS

SEQ ID NO: 1051 - protein, 127 aa, synthetic construct
  REGION 1..127: note = Description of Artificial Sequence: Synthetic polypeptide
QVQLQESGGGLVQVGGSLMVSCAASGGTFSSYATGWFRQVPGKEREFIAGISRNSGRTYYAESVKGRFTISRDNAKNTVYLQMNTLKPDDTAVYYCAAARYFTRDVVYTSGDDYDYWGQGTQVTVSS

SEQ ID NO: 1052 - protein, 127 aa, synthetic construct
  REGION 1..127: note = Description of Artificial Sequence: Synthetic polypeptide
QVQLQESGGGLVQAGGSLMVSCAASGGTFSSYATGWFRQVPGKEREFIAGISRSGGRTYYAESVKGRFTISRDNAKNTVYLQMNTLKPDDTAVYYCAAARYFTTSVVYTSGDDYDYWGQGTQVTVSS

SEQ ID NO: 1053 - protein, 125 aa, synthetic construct
  REGION 1..125: note = Description of Artificial Sequence: Synthetic polypeptide
QVQLQESGGGLVQAGGSLRLSCAASGRTFSSYAMGWFRQAPGKEREFVAAISWSGSNTYYADSVKGRFTISRDNAKNTVYLQMDSLKPEDTAVYYCAAGGSTRVVVTTTPVVKYWGQGTQVTVSS

SEQ ID NO: 1054 - protein, 125 aa, synthetic construct
  REGION 1..125: note = Description of Artificial Sequence: Synthetic polypeptide
QVQLQESGGGLVQAGGSLRLSCAASGRTFSSYAMGWFRQAPGMEREFVAAISWSGYSTYYADSVKGRFTISRDDAKNTVYLQMDSLKPEDTAVYYCAAGGSTRVVVTTTPVVKYWGQGTQVTVSS

SEQ ID NO: 1055 - protein, 125 aa, synthetic construct
  REGION 1..125: note = Description of Artificial Sequence: Synthetic polypeptide
QVQLQESGGGLVQAGGSLRLSCAASGRTFSSYALGWFRQAPGKEREFVAAISWSGGNTYYADSVKGRFTISRDDAKNTVYLQMDSLKPEDTAVYYCAAGGSTRVVVTTTPVVKYWGQGTQVTVSS

SEQ ID NO: 1056 - protein, 125 aa, synthetic construct
  REGION 1..125: note = Description of Artificial Sequence: Synthetic polypeptide
QVQLQESGGGLVQAGGSLRLSCAASERTFSSYTMGWFRQAPGKEREFVAAMSWSGGSTYYADSVKGRFTISRDNAKNTVYLQMDSLKPEDTAVYYCAAGGSTRVVVTTTPVVKYWGQGTQVTVSS

SEQ ID NO: 1057 - protein, 125 aa, synthetic construct
  REGION 1..125: note = Description of Artificial Sequence: Synthetic polypeptide
QVQLQESGGGLVQAGGSLRLSCAASERTFSSYAMGWFRQAPGKEREFVAAISWSGGSTYYADSVKGRFTISRDNAKNTVYLQMDSLKPEDTAVYYCAAGGSTRVVVTTTPIVKYWGQGTQVTVSS

SEQ ID NO: 1058 - protein, 125 aa, synthetic construct
  REGION 1..125: note = Description of Artificial Sequence: Synthetic polypeptide
QVQLQESGGGWVQAGGSLRLSCAASGRTFSSYAMGWFRQAPGKEREFVAAISWSGSSTYYADSVKGRFTISRDNAKNTVYLLMDSLKPEDTAVYYCAAGGSTRVVVTTTPVVKYWGQGTQVTVSS

SEQ ID NO: 1059 - protein, 121 aa, synthetic construct
  REGION 1..121: note = Description of Artificial Sequence: Synthetic polypeptide
QVQLQESGGGLVQAGGSLRLSCAASGRTFSTLTVAWFRQAPGKEREFVVASIPSGSNTGYAESVKGRFTISRDIAKNTVYLQMNSLKPEDTAMYFCAARIYFGSSRGYDYWGQGTQVTVSS

SEQ ID NO: 1060 - protein, 121 aa, synthetic construct
  REGION 1..121: note = Description of Artificial Sequence: Synthetic polypeptide
QVQLQESGGGLVQAGGSLRLSCAASGRTFTTYTVAWFRQAPGKEREFLVASIPTGSNTAYAESVKGRFTISRGNAKNTVYLQMNSLKPEDTAMYYCAARTYFGSSRGYDYWGQGTQVTVSS

SEQ ID NO: 1061 - protein, 125 aa, synthetic construct
  REGION 1..125: note = Description of Artificial Sequence: Synthetic polypeptide
QVQLQESGGGLVQAGDSLRLSCATSGRTFNLYRVGWFRQAPGKEREFVARITWSADITQYADSVKGRFTISRDNAKNTVYLQMNSLKPEDTAIYYCATTLRKSSGIYHVDDYDDWGQGTQVTVSS

SEQ ID NO: 1062 - protein, 125 aa, synthetic construct
  REGION 1..125: note = Description of Artificial Sequence: Synthetic polypeptide
QVQLQESGGGLVQAGGSLRLSCATSGRTFNLYRVGWFRQAPGKEREFVARITWSADITQYTDSVKGRFTISRDNAKNTVYLQMNSLKPEDTAIYYCATTLRKSSGIYHTDDYDYWGQGTQVTVSS

SEQ ID NO: 1063 - protein, 122 aa, synthetic construct
  REGION 1..122: note = Description of Artificial Sequence: Synthetic polypeptide
QVQLQESGGGLVQPGGSLRLSCAASGFTFSDYAMSWVRQAPGKGLEWVSGISSGGYKIGYTDSTKGRFTISRDNAKNTLYLQMNSLTAEDTAVYYCAKGTQWSWSLRDNTSRGQGTQVTVSS

SEQ ID NO: 1064 - protein, 122 aa, synthetic construct
  REGION 1..122: note = Description of Artificial Sequence: Synthetic polypeptide
QVQLQESGGGLVQPGGSLRLSCKASGFTFSSYAMSWVRQAPGKGLEWVSGISSGGYKIGYTDSTKGRFTISRDNAKNTLYLQMNSLNAEDTAVYYCAKGTQWSWALRDSTSRGQGTQVTVSS

SEQ ID NO: 1065 - protein, 111 aa, synthetic construct
  REGION 1..111: note = Description of Artificial Sequence: Synthetic polypeptide
QVQLQESGGGLVQAGGSLTLSCTASGSTFSINHFSWYRQAPGKQRELVAFISSDGVSIDVESVKGRFTISGDNDKNTAYLQMNGLKPEDTAVYYCYYRGFWGQGTQVTVSS

SEQ ID NO: 1066 - protein, 111 aa, synthetic construct
  REGION 1..111: note = Description of Artificial Sequence: Synthetic polypeptide
QVQLQESGGGLVQPGGSLTLSCTASGSTFSINHFAWYRQAPGKQRELVAFISSDGRSTDVESVKGRFTISGDNDKNTAYLQMNGLKPEDTAVYYCYYRGSWGQGTQVTVSS

SEQ ID NO: 1067 - protein, 127 aa, synthetic construct
  REGION 1..127: note = Description of Artificial Sequence: Synthetic polypeptide
QVQLQESGGGLVQAGGSLSLSCAASEGTISHAAMGWFRQAPGKERQFVAYDTWTGGSTNYADSVKDRFTITGDHAKNTVYLQMNSLKPEDTGVYYCAVRGRYSASYTYTNPASYKYWGQGTQVTVSS

SEQ ID NO: 1068 - protein, 126 aa, synthetic construct
  REGION 1..126: note = Description of Artificial Sequence: Synthetic polypeptide
QVQLQESGGGLVQAGGSLRLSCAASGGTFSSSAMGWFRQAPGKEREFVATITQNDVPTYYTHSVKGRFTISRDNAKNTMYLQMNSLKPEDTAVYYCAQRVAQASGWRTTIKDYGYWGQGTQVTVSS

SEQ ID NO: 1069 - protein, 129 aa, synthetic construct
  REGION 1..129: note = Description of Artificial Sequence: Synthetic polypeptide
QVQLQESGGGLVQAGGSLRLSCAASGLTSSTYRMAWFRQAPGKEREFAAGISYSADSGGSTNYADSVKGRFTISRDNAKNTVYLQMSSLKPEDTAVYYCAAGRYSGTYNSPYSSSYVYWGQGTQVTVSS

SEQ ID NO: 1070 - protein, 120 aa, synthetic construct
  REGION 1..120: note = Description of Artificial Sequence: Synthetic polypeptide
QVQLQESGGGLVQTGGSLRLSCAASGSTFSRNTMGWFRQAPGKERVFVLGISWSGIRSYYLDSAKARFTISRDNAKNTVYLQMNSLRPEDTAVYYCAAQEGSSPGPYKYWGQGTQVTVSS

SEQ ID NO: 1071 - protein, 121 aa, synthetic construct
  REGION 1..121: note = Description of Artificial Sequence: Synthetic polypeptide
QVQLQESGGGVVQVGGSLRLSCAASGGTFGYYAVGWFRQAPGKEREFVAAVTWNGAYLYSDPVKGRFTISRDNAKNTVYLQMNSLKSEDTAVYYCGLDRWSAVVESTPSTRGQGTQVTVSS

SEQ ID NO: 1072 - protein, 125 aa, synthetic construct
  REGION 1..125: note = Description of Artificial Sequence: Synthetic polypeptide
QVQLQESGGGLVQAGGSLRLSCAASGGAFSSYVMGWFRQAPGKEREFVAAVISWSGRITDYADSVKGRFSISRDNAKSTVYLQMNNLKPEDTAVYYCAAKTGMYIDLRTSTFDYWGQGTQVTVSS

SEQ ID NO: 1073 - protein, 120 aa, synthetic construct
  REGION 1..120: note = Description of Artificial Sequence: Synthetic polypeptide
QVQLQESGGGSVQAGGSLRLSCTASGRTFTDYTMGWFRQAPGKEREFMLGISSNGYRRYYTGSMKDRFTISRDNVKKTVYLQMNDLKPEDTAVYYCAASEDHGAPRYDYWGQGTQVTVSS

SEQ ID NO: 1074 - protein, 125 aa, synthetic construct
  REGION 1..125: note = Description of Artificial Sequence: Synthetic polypeptide
EVQLLESGGGLVQPGGSLTLSCAASGRTFSSYAMGWFRQAPGKEREFVAAISWSGSNTYYADSVKGRFTISRDNSKNTLYLQMNSLRAEDTAVYYCAAGGSTRVVVTTTPVVKYWGQGTLVTVSS

SEQ ID NO: 1075 - protein, 125 aa, synthetic construct
  REGION 1..125: note = Description of Artificial Sequence: Synthetic polypeptide
EVQLLESGGGLVQPGGSLTLSCAASGRTFSSYAMGWFRQAPGMEREFVAAISWSGYSTYYADSVKGRFTISRDNSKNTLYLQMNSLRAEDTAVYYCAAGGSTRVVVTTTPVVKYWGQGTLVTVSS

SEQ ID NO: 1076 - protein, 111 aa, synthetic construct
  REGION 1..111: note = Description of Artificial Sequence: Synthetic polypeptide
EVQLVESGGGLVQPGGSLTLSCAASGSTFSINHFSWYRQAPGKQRELVAFISSDGVSIDVESVKGRFTISGDNSKNTAYLQMNSLRAEDTAVYYCYYRGFWGQGTLVTVSS

SEQ ID NO: 1077 - protein, 125 aa, synthetic construct
  REGION 1..125: note = Description of Artificial Sequence: Synthetic polypeptide
EVQLLESGGGLVQPGGSLTLSCAASGRTFSSYALGWFRQAPGKEREFVAAISWSGGNTYYADSVKGRFTISRDNSKNTLYLQMNSLRAEDTAVYYCAAGGSTRVVVTTTPVVKYWGQGTLVTVSS

SEQ ID NO: 1078 - protein, 125 aa, synthetic construct
  REGION 1..125: note = Description of Artificial Sequence: Synthetic polypeptide
EVQLLESGGGLVQPGGSLTLSCAASERTFSSYTMGWFRQAPGKEREFVAAMSWSGGSTYYADSVKGRFTISRDNSKNTLYLQMNSLRAEDTAVYYCAAGGSTRVVVTTTPVVKYWGQGTLVTVSS

SEQ ID NO: 1079 - protein, 125 aa, synthetic construct
  REGION 1..125: note = Description of Artificial Sequence: Synthetic polypeptide
EVQLLESGGGLVQPGGSLTLSCAASGRTFSSYAMGWFRQAPGKEREFVAAISWSGSSTYYADSVKGRFTISRDNSKNTLYLQMNSLRAEDTAVYYCAAGGSTRVVVTTTPVVKYWGQGTLVTVSS

SEQ ID NO: 1080 - protein, 10 aa, synthetic construct
  REGION 1..10: note = Description of Artificial Sequence: Synthetic peptide
GVTFSINYID

SEQ ID NO: 1081 - protein, 10 aa, synthetic construct
  REGION 1..10: note = Description of Artificial Sequence: Synthetic peptide
GPTFSINYID

SEQ ID NO: 1082 - protein, 10 aa, synthetic construct
  REGION 1..10: note = Description of Artificial Sequence: Synthetic peptide
GVTFSINYID

SEQ ID NO: 1083 - protein, 10 aa, synthetic construct
  REGION 1..10: note = Description of Artificial Sequence: Synthetic peptide
GSTFSRNYID

SEQ ID NO: 1084 - protein, 10 aa, synthetic construct
  REGION 1..10: note = Description of Artificial Sequence: Synthetic peptide
GVTFSASYID

SEQ ID NO: 1085 - protein, 10 aa, synthetic construct
  REGION 1..10: note = Description of Artificial Sequence: Synthetic peptide
GSTFNNYAMD

SEQ ID NO: 1086 - protein, 10 aa, synthetic construct
  REGION 1..10: note = Description of Artificial Sequence: Synthetic peptide
GVTFSINYID

SEQ ID NO: 1087 - protein, 10 aa, synthetic construct
  REGION 1..10: note = Description of Artificial Sequence: Synthetic peptide
GVTFSINYID

SEQ ID NO: 1088 - protein, 10 aa, synthetic construct
  REGION 1..10: note = Description of Artificial Sequence: Synthetic peptide
GSTFGRNYID

SEQ ID NO: 1089 - protein, 10 aa, synthetic construct
  REGION 1..10: note = Description of Artificial Sequence: Synthetic peptide
GVTFSINYID

SEQ ID NO: 1090 - protein, 10 aa, synthetic construct
  REGION 1..10: note = Description of Artificial Sequence: Synthetic peptide
GVTFSASYID

SEQ ID NO: 1091 - protein, 10 aa, synthetic construct
  REGION 1..10: note = Description of Artificial Sequence: Synthetic peptide
GVTFSINYID

SEQ ID NO: 1092 - protein, 10 aa, synthetic construct
  REGION 1..10: note = Description of Artificial Sequence: Synthetic peptide
GVTFNINYID

SEQ ID NO: 1093 - protein, 10 aa, synthetic construct
  REGION 1..10: note = Description of Artificial Sequence: Synthetic peptide
GFDFSISYID

SEQ ID NO: 1094 - protein, 10 aa, synthetic construct
  REGION 1..10: note = Description of Artificial Sequence: Synthetic peptide
GSTFSRNYID

SEQ ID NO: 1095 - protein, 10 aa, synthetic construct
  REGION 1..10: note = Description of Artificial Sequence: Synthetic peptide
GVTFSISYID

SEQ ID NO: 1096 - protein, 10 aa, synthetic construct
  REGION 1..10: note = Description of Artificial Sequence: Synthetic peptide
GVTFSINYID

SEQ ID NO: 1097 - protein, 10 aa, synthetic construct
  REGION 1..10: note = Description of Artificial Sequence: Synthetic peptide
GSTFSRNYID

SEQ ID NO: 1098 - protein, 10 aa, synthetic construct
  REGION 1..10: note = Description of Artificial Sequence: Synthetic peptide
GSTFSKNYID

SEQ ID NO: 1099 - protein, 10 aa, synthetic construct
  REGION 1..10: note = Description of Artificial Sequence: Synthetic peptide
GSTSSRNYID

SEQ ID NO: 1100 - protein, 10 aa, synthetic construct
  REGION 1..10: note = Description of Artificial Sequence: Synthetic peptide
GSTFSRNYID

SEQ ID NO: 1101 - protein, 10 aa, synthetic construct
  REGION 1..10: note = Description of Artificial Sequence: Synthetic peptide
GSTFSRNYID

SEQ ID NO: 1102 - protein, 10 aa, synthetic construct
  REGION 1..10: note = Description of Artificial Sequence: Synthetic peptide
GRTFSGFGTG

SEQ ID NO: 1103 - protein, 10 aa, synthetic construct
  REGION 1..10: note = Description of Artificial Sequence: Synthetic peptide
GRTFSGFGTG

SEQ ID NO: 1104 - protein, 10 aa, synthetic construct
  REGION 1..10: note = Description of Artificial Sequence: Synthetic peptide
GRTFSGFGTG

SEQ ID NO: 1105 - protein, 10 aa, synthetic construct
  REGION 1..10: note = Description of Artificial Sequence: Synthetic peptide
GRTFSGFGTG

SEQ ID NO: 1106 - protein, 10 aa, synthetic construct
  REGION 1..10: note = Description of Artificial Sequence: Synthetic peptide
GRTFSGFGTG

SEQ ID NO: 1107 - protein, 10 aa, synthetic construct
  REGION 1..10: note = Description of Artificial Sequence: Synthetic peptide
GRTFSGFGTG

SEQ ID NO: 1108 - protein, 10 aa, synthetic construct
  REGION 1..10: note = Description of Artificial Sequence: Synthetic peptide
GRTFSGFGTG

SEQ ID NO: 1109 - protein, 10 aa, synthetic construct
  REGION 1..10: note = Description of Artificial Sequence: Synthetic peptide
GRTFSGFGTG

SEQ ID NO: 1110 - protein, 10 aa, synthetic construct
  REGION 1..10: note = Description of Artificial Sequence: Synthetic peptide
GRTFSGFGTG

SEQ ID NO: 1111 - protein, 10 aa, synthetic construct
  REGION 1..10: note = Description of Artificial Sequence: Synthetic peptide
GRTFSGFGTG

SEQ ID NO: 1112 - protein, 10 aa, synthetic construct
  REGION 1..10: note = Description of Artificial Sequence: Synthetic peptide
GRTFSGFGTG

SEQ ID NO: 1113 - protein, 10 aa, synthetic construct
  REGION 1..10: note = Description of Artificial Sequence: Synthetic peptide
GRTFSGFGTG

SEQ ID NO: 1114 - protein, 10 aa, synthetic construct
  REGION 1..10: note = Description of Artificial Sequence: Synthetic peptide
GRTFSGFGTG

SEQ ID NO: 1115 - protein, 10 aa, synthetic construct
  REGION 1..10: note = Description of Artificial Sequence: Synthetic peptide
GRTFSGFGTG

SEQ ID NO: 1116 - protein, 10 aa, synthetic construct
  REGION 1..10: note = Description of Artificial Sequence: Synthetic peptide
GRTFSGFGTG

SEQ ID NO: 1117 - protein, 10 aa, synthetic construct
  REGION 1..10: note = Description of Artificial Sequence: Synthetic peptide
GRTFSGFGTG

SEQ ID NO: 1118 - protein, 10 aa, synthetic construct
  REGION 1..10: note = Description of Artificial Sequence: Synthetic peptide
GRTFSGFGTG

SEQ ID NO: 1119 - protein, 10 aa, synthetic construct
  REGION 1..10: note = Description of Artificial Sequence: Synthetic peptide
GGTWSSYATG

SEQ ID NO: 1120 - protein, 10 aa, synthetic construct
  REGION 1..10: note = Description of Artificial Sequence: Synthetic peptide
GGTWSSYATG

SEQ ID NO: 1121 - protein, 10 aa, synthetic construct
  REGION 1..10: note = Description of Artificial Sequence: Synthetic peptide
GGTFSSYATG

SEQ ID NO: 1122 - protein, 10 aa, synthetic construct
  REGION 1..10: note = Description of Artificial Sequence: Synthetic peptide
GGTFSSYATG

SEQ ID NO: 1123 - protein, 10 aa, synthetic construct
  REGION 1..10: note = Description of Artificial Sequence: Synthetic peptide
GGTFSSYATG

SEQ ID NO: 1124 - protein, 10 aa, synthetic construct
  REGION 1..10: note = Description of Artificial Sequence: Synthetic peptide
GGTFSSYATG

SEQ ID NO: 1125 - protein, 10 aa, synthetic construct
  REGION 1..10: note = Description of Artificial Sequence: Synthetic peptide
GGTWSSYATG

SEQ ID NO: 1126 - protein, 10 aa, synthetic construct
  REGION 1..10: note = Description of Artificial Sequence: Synthetic peptide
GGTFSSYATG

SEQ ID NO: 1127 - protein, 10 aa, synthetic construct
  REGION 1..10: note = Description of Artificial Sequence: Synthetic peptide
GGTFSSYATG

SEQ ID NO: 1128 - protein, 10 aa, synthetic construct
  REGION 1..10: note = Description of Artificial Sequence: Synthetic peptide
GGTFSSYATG

SEQ ID NO: 1129 - protein, 10 aa, synthetic construct
  REGION 1..10: note = Description of Artificial Sequence: Synthetic peptide
GRTFSSYAMG

SEQ ID NO: 1130 - protein, 10 aa, synthetic construct
  REGION 1..10: note = Description of Artificial Sequence: Synthetic peptide
GRTFSSYAMG

SEQ ID NO: 1131 - protein, 10 aa, synthetic construct
  REGION 1..10: note = Description of Artificial Sequence: Synthetic peptide
GRTFSSYALG

SEQ ID NO: 1132 - protein, 10 aa, synthetic construct
  REGION 1..10: note = Description of Artificial Sequence: Synthetic peptide
ERTFSSYTMG

SEQ ID NO: 1133 - protein, 10 aa, synthetic construct
  REGION 1..10: note = Description of Artificial Sequence: Synthetic peptide
ERTFSSYAMG

SEQ ID NO: 1134 - protein, 10 aa, synthetic construct
  REGION 1..10: note = Description of Artificial Sequence: Synthetic peptide
GRTFSSYAMG

SEQ ID NO: 1135 - protein, 10 aa, synthetic construct
  REGION 1..10: note = Description of Artificial Sequence: Synthetic peptide
GRTFSTLTVA

SEQ ID NO: 1136 - protein, 10 aa, synthetic construct
  REGION 1..10: note = Description of Artificial Sequence: Synthetic peptide
GRTFTTYTVA

SEQ ID NO: 1137 - protein, 10 aa, synthetic construct
  REGION 1..10: note = Description of Artificial Sequence: Synthetic peptide
GRTFNLYRVG

SEQ ID NO: 1138 - protein, 10 aa, synthetic construct
  REGION 1..10: note = Description of Artificial Sequence: Synthetic peptide
GRTFNLYRVG

SEQ ID NO: 1139 - protein, 10 aa, synthetic construct
  REGION 1..10: note = Description of Artificial Sequence: Synthetic peptide
GFTFSDYAMS

SEQ ID NO: 1140 - protein, 10 aa, synthetic construct
  REGION 1..10: note = Description of Artificial Sequence: Synthetic peptide
GFTFSSYAMS

SEQ ID NO: 1141 - protein, 10 aa, synthetic construct
  REGION 1..10: note = Description of Artificial Sequence: Synthetic peptide
GSTFSINHFS

SEQ ID NO: 1142 - protein, 10 aa, synthetic construct
  REGION 1..10: note = Description of Artificial Sequence: Synthetic peptide
GSTFSINHFA

SEQ ID NO: 1143 - protein, 10 aa, synthetic construct
  REGION 1..10: note = Description of Artificial Sequence: Synthetic peptide
EGTISHAAMG

SEQ ID NO: 1144 - protein, 10 aa, synthetic construct
  REGION 1..10: note = Description of Artificial Sequence: Synthetic peptide
GGTFSSSAMG

SEQ ID NO: 1145 - protein, 10 aa, synthetic construct
  REGION 1..10: note = Description of Artificial Sequence: Synthetic peptide
GLTSSTYRMA

SEQ ID NO: 1146 - protein, 10 aa, synthetic construct
  REGION 1..10: note = Description of Artificial Sequence: Synthetic peptide
GSTFSRNTMG

SEQ ID NO: 1147 - protein, 10 aa, synthetic construct
  REGION 1..10: note = Description of Artificial Sequence: Synthetic peptide
GGTFGYYAVG

SEQ ID NO: 1148 - protein, 10 aa, synthetic construct
  REGION 1..10: note = Description of Artificial Sequence: Synthetic peptide
GGAFSSYVMG

SEQ ID NO: 1149 - protein, 10 aa, synthetic construct
  REGION 1..10: note = Description of Artificial Sequence: Synthetic peptide
GRTFTDYTMG

SEQ ID NO: 1150 - protein, 10 aa, synthetic construct
  REGION 1..10: note = Description of Artificial Sequence: Synthetic peptide
GRTFSSYAMG

SEQ ID NO: 1151 - protein, 10 aa, synthetic construct
  REGION 1..10: note = Description of Artificial Sequence: Synthetic peptide
GRTFSSYAMG

SEQ ID NO: 1152 - protein, 10 aa, synthetic construct
  REGION 1..10: note = Description of Artificial Sequence: Synthetic peptide
GSTFSINHFS

SEQ ID NO: 1153 - protein, 10 aa, synthetic construct
  REGION 1..10: note = Description of Artificial Sequence: Synthetic peptide
GRTFSSYALG

SEQ ID NO: 1154 - protein, 10 aa, synthetic construct
  REGION 1..10: note = Description of Artificial Sequence: Synthetic peptide
ERTFSSYTMG

SEQ ID NO: 1155 - protein, 10 aa, synthetic construct
  REGION 1..10: note = Description of Artificial Sequence: Synthetic peptide
GRTFSSYAMG

SEQ ID NO: 1156 - protein, 16 aa, synthetic construct
  REGION 1..16: note = Description of Artificial Sequence: Synthetic peptide
QITRDSNSFYADSVKG

SEQ ID NO: 1157 - protein, 16 aa, synthetic construct
  REGION 1..16: note = Description of Artificial Sequence: Synthetic peptide
QITRDSNSFYADSVKG

SEQ ID NO: 1158 - protein, 16 aa, synthetic construct
  REGION 1..16: note = Description of Artificial Sequence: Synthetic peptide
QITRDSNSFYADSVKG

SEQ ID NO: 1159 - protein, 16 aa, synthetic construct
  REGION 1..16: note = Description of Artificial Sequence: Synthetic peptide
QITSGGNTHYEPSLKG

SEQ ID NO: 1160 - protein, 16 aa, synthetic construct
  REGION 1..16: note = Description of Artificial Sequence: Synthetic peptide
QITRGGDSFYADSVKG

SEQ ID NO: 1161 - protein, 16 aa, synthetic construct
  REGION 1..16: note = Description of Artificial Sequence: Synthetic peptide
QITRDSSSFYADSVKG

SEQ ID NO: 1162 - protein, 16 aa, synthetic construct
  REGION 1..16: note = Description of Artificial Sequence: Synthetic peptide
QITRDSNSFYADSVKG

SEQ ID NO: 1163 - protein, 16 aa, synthetic construct
  REGION 1..16: note = Description of Artificial Sequence: Synthetic peptide
QITRDDTSFYADSVKG

SEQ ID NO: 1164 - protein, 16 aa, synthetic construct
  REGION 1..16: note = Description of Artificial Sequence: Synthetic peptide
QITSGGNTHYEPSLKG

SEQ ID NO: 1165 - protein, 16 aa, synthetic construct
  REGION 1..16: note = Description of Artificial Sequence: Synthetic peptide
QITRDGSSFYADSVKG

SEQ ID NO: 1166 - protein, 16 aa, synthetic construct
  REGION 1..16: note = Description of Artificial Sequence: Synthetic peptide
QITRGGDSFYADSVKG

SEQ ID NO: 1167 - protein, 16 aa, synthetic construct
  REGION 1..16: note = Description of Artificial Sequence: Synthetic peptide
QITRDSNSFYADSVKG

SEQ ID NO: 1168 - protein, 16 aa, synthetic construct
  REGION 1..16: note = Description of Artificial Sequence: Synthetic peptide
QITRDSTRFYADSVKG

SEQ ID NO: 1169 - protein, 16 aa, synthetic construct
  REGION 1..16: note = Description of Artificial Sequence: Synthetic peptide
QITRGGDSFYADSVKG

SEQ ID NO: 1170 - protein, 16 aa, synthetic construct
  REGION 1..16: note = Description of Artificial Sequence: Synthetic peptide
QITSAGNTHYEPSLKG

SEQ ID NO: 1171 - protein, 16 aa, synthetic construct
  REGION 1..16: note = Description of Artificial Sequence: Synthetic peptide
QITRGGDSFYADSVKG

SEQ ID NO: 1172 - protein, 16 aa, synthetic construct
  REGION 1..16: note = Description of Artificial Sequence: Synthetic peptide
QITRDSNSFYADSVKG

SEQ ID NO: 1173 - protein, 16 aa, synthetic construct
  REGION 1..16: note = Description of Artificial Sequence: Synthetic peptide
QITSGGNTHYEPSLKG

SEQ ID NO: 1174 - protein, 16 aa, synthetic construct
  REGION 1..16: note = Description of Artificial Sequence: Synthetic peptide
QITSGGNTHYEPSLKG

SEQ ID NO: 1175 - protein, 16 aa, synthetic construct
  REGION 1..16: note = Description of Artificial Sequence: Synthetic peptide
QITSGGNTHYEPSLKG

SEQ ID NO: 1176 - protein, 16 aa, synthetic construct
  REGION 1..16: note = Description of Artificial Sequence: Synthetic peptide
QITSGGNTHYEPSLKG

SEQ ID NO: 1177 - protein, 16 aa, synthetic construct
  REGION 1..16: note = Description of Artificial Sequence: Synthetic peptide
QITSGGNTHYEPSLKG

SEQ ID NO: 1178 - protein, 17 aa, synthetic construct
  REGION 1..17: note = Description of Artificial Sequence: Synthetic peptide
AISWAGGRTHYEDSVKG

SEQ ID NO: 1179 - protein, 17 aa, synthetic construct
  REGION 1..17: note = Description of Artificial Sequence: Synthetic peptide
AISWDGGRTHYADFVKG

SEQ ID NO: 1180 - protein, 17 aa, synthetic construct
  REGION 1..17: note = Description of Artificial Sequence: Synthetic peptide
AISWVGGRTHYADSVKG

SEQ ID NO: 1181 - protein, 17 aa, synthetic construct
  REGION 1..17: note = Description of Artificial Sequence: Synthetic peptide
AISWSGGRTHYADSVKG

SEQ ID NO: 1182 - protein, 17 aa, synthetic construct
  REGION 1..17: note = Description of Artificial Sequence: Synthetic peptide
AISWDGGRTHYADSVKG

SEQ ID NO: 1183 - protein, 17 aa, synthetic construct
  REGION 1..17: note = Description of Artificial Sequence: Synthetic peptide
AISWSGGTTHYADSVKG

SEQ ID NO: 1184 - protein, 17 aa, synthetic construct
  REGION 1..17: note = Description of Artificial Sequence: Synthetic peptide
AISWDGGRTHYADSVKG

SEQ ID NO: 1185 - protein, 17 aa, synthetic construct
  REGION 1..17: note = Description of Artificial Sequence: Synthetic peptide
AISWSGGTTHYADSVKG

SEQ ID NO: 1186 - protein, 17 aa, synthetic construct
  REGION 1..17: note = Description of Artificial Sequence: Synthetic peptide
AISWDGGRTHYADSVKG

SEQ ID NO: 1187 - protein, 17 aa, synthetic construct
  REGION 1..17: note = Description of Artificial Sequence: Synthetic peptide
AISWSGGTTHYADSVKG

SEQ ID NO: 1188 - protein, 17 aa, synthetic construct
  REGION 1..17: note = Description of Artificial Sequence: Synthetic peptide
AISWSGGTTHYADSVKG

SEQ ID NO: 1189 - protein, 17 aa, synthetic construct
  REGION 1..17: note = Description of Artificial Sequence: Synthetic peptide
AISWDGGRTHYADSVKG

SEQ ID NO: 1190 - protein, 17 aa, synthetic construct
  REGION 1..17: note = Description of Artificial Sequence: Synthetic peptide
AISWDGGRTHYADFVKG

SEQ ID NO: 1191 - protein, 17 aa, synthetic construct
  REGION 1..17: note = Description of Artificial Sequence: Synthetic peptide
AVSWSGGTTEIADSVKG

SEQ ID NO: 1192 - protein, 17 aa, synthetic construct
  REGION 1..17: note = Description of Artificial Sequence: Synthetic peptide
AVSQSGGTTHYADSVKG

SEQ ID NO: 1193 - protein, 17 aa, synthetic construct
  REGION 1..17: note = Description of Artificial Sequence: Synthetic peptide
AISWSGGTTHYADSVKG

SEQ ID NO: 1194 - protein, 17 aa, synthetic construct
  REGION 1..17: note = Description of Artificial Sequence: Synthetic peptide
AISWAGGRTHYEDSVKG

SEQ ID NO: 1195 - protein, 17 aa, synthetic construct
  REGION 1..17: note = Description of Artificial Sequence: Synthetic peptide
GISRSGGRTYYAESVKG

SEQ ID NO: 1196 - protein, 17 aa, synthetic construct
  REGION 1..17: note = Description of Artificial Sequence: Synthetic peptide
GISRSGGRTYYAESVKG

SEQ ID NO: 1197 - protein, 16 aa, synthetic construct
  REGION 1..16: note = Description of Artificial Sequence: Synthetic peptide
GISRNSGRTYAESVKG

SEQ ID NO: 1198 - protein, 17 aa, synthetic construct
  REGION 1..17: note = Description of Artificial Sequence: Synthetic peptide
GVSRNSGRTYYAESVKG

SEQ ID NO: 1199 - protein, 17 aa, synthetic construct
  REGION 1..17: note = Description of Artificial Sequence: Synthetic peptide
GISRSGGRTYYAESVKG

SEQ ID NO: 1200 - protein, 17 aa, synthetic construct
  REGION 1..17: note = Description of Artificial Sequence: Synthetic peptide
GISRSGGRTYYAESVKG

SEQ ID NO: 1201 - protein, 17 aa, synthetic construct
  REGION 1..17: note = Description of Artificial Sequence: Synthetic peptide
GISRSGGRTYYAESVKG

SEQ ID NO: 1202 - protein, 17 aa, synthetic construct
  REGION 1..17: note = Description of Artificial Sequence: Synthetic peptide
GISRNSGRTYYAESVKG

SEQ ID NO: 1203 - protein, 17 aa, synthetic construct
  REGION 1..17: note = Description of Artificial Sequence: Synthetic peptide
GISRNSGRTYYAESVKG

SEQ ID NO: 1204 - protein, 17 aa, synthetic construct
  REGION 1..17: note = Description of Artificial Sequence: Synthetic peptide
GISRSGGRTYYAESVKG

SEQ ID NO: 1205 - protein, 17 aa, synthetic construct
  REGION 1..17: note = Description of Artificial Sequence: Synthetic peptide
AISWSGSNTYYADSVKG

SEQ ID NO: 1206 - protein, 17 aa, synthetic construct
  REGION 1..17: note = Description of Artificial Sequence: Synthetic peptide
AISWSGYSTYYADSVKG

SEQ ID NO: 1207 - protein, 17 aa, synthetic construct
  REGION 1..17: note = Description of Artificial Sequence: Synthetic peptide
AISWSGGNTYYADSVKG

SEQ ID NO: 1208 - protein, 17 aa, synthetic construct
  REGION 1..17: note = Description of Artificial Sequence: Synthetic peptide
AMSWSGGSTYYADSVKG

SEQ ID NO: 1209 - protein, 17 aa, synthetic construct
  REGION 1..17: note = Description of Artificial Sequence: Synthetic peptide
AISWSGGSTYYADSVKG

SEQ ID NO: 1210 - protein, 17 aa, synthetic construct
  REGION 1..17: note = Description of Artificial Sequence: Synthetic peptide
AISWSGSSTYYADSVKG

SEQ ID NO: 1211 - protein, 17 aa, synthetic construct
  REGION 1..17: note = Description of Artificial Sequence: Synthetic peptide
ASIPSGSNTGYAESVKG

SEQ ID NO: 1212 - protein, 17 aa, synthetic construct
  REGION 1..17: note = Description of Artificial Sequence: Synthetic peptide
ASIPTGSNTAYAESVKG

SEQ ID NO: 1213 - protein, 17 aa, synthetic construct
  REGION 1..17: note = Description of Artificial Sequence: Synthetic peptide
RITWSADITQYADSVKG

SEQ ID NO: 1214 - protein, 17 aa, synthetic construct
  REGION 1..17: note = Description of Artificial Sequence: Synthetic peptide
RITWSADITQYTDSVKG

SEQ ID NO: 1215 - protein, 17 aa, synthetic construct
  REGION 1..17: note = Description of Artificial Sequence: Synthetic peptide
GISSGGYKIGYTDSTKG

SEQ ID NO: 1216 - protein, 17 aa, synthetic construct
  REGION 1..17: note = Description of Artificial Sequence: Synthetic peptide
GISSGGYKIGYTDSTKG

SEQ ID NO: 1217 - protein, 16 aa, synthetic construct
  REGION 1..16: note = Description of Artificial Sequence: Synthetic peptide
FISSDGVSIDVESVKG

SEQ ID NO: 1218 - protein, 16 aa, synthetic construct
  REGION 1..16: note = Description of Artificial Sequence: Synthetic peptide
FISSDGRSTDVESVKG

SEQ ID NO: 1219 - protein, 17 aa, synthetic construct
  REGION 1..17: note = Description of Artificial Sequence: Synthetic peptide
YDTWTGGSTNYADSVKD

SEQ ID NO: 1220 - protein, 17 aa, synthetic construct
  REGION 1..17: note = Description of Artificial Sequence: Synthetic peptide
TITQNDVPTYYTHSVKG

SEQ ID NO: 1221 - protein, 21 aa, synthetic construct
  REGION 1..21: note = Description of Artificial Sequence: Synthetic peptide
AGISYSADSGGSTNYADSVKG

SEQ ID NO: 1222 - protein, 17 aa, synthetic construct
  REGION 1..17: note = Description of Artificial Sequence: Synthetic peptide
GISWSGIRSYYLDSAKA

SEQ ID NO: 1223 - protein, 16 aa, synthetic construct
  REGION 1..16: note = Description of Artificial Sequence: Synthetic peptide
AVTWNGAYLYSDPVKG

SEQ ID NO: 1224 - protein, 18 aa, synthetic construct
  REGION 1..18: note = Description of Artificial Sequence: Synthetic peptide
AVISWSGRITDYADSVKG

SEQ ID NO: 1225 - protein, 17 aa, synthetic construct
  REGION 1..17: note = Description of Artificial Sequence: Synthetic peptide
GISSNGYRRYYTGSMKD

SEQ ID NO: 1226 - protein, 16 aa, synthetic construct
  REGION 1..16: note = Description of Artificial Sequence: Synthetic peptide
ISWSGSNTYYADSVKG

SEQ ID NO: 1227 - protein, 16 aa, synthetic construct
  REGION 1..16: note = Description of Artificial Sequence: Synthetic peptide
ISWSGYSTYYADSVKG

SEQ ID NO: 1228 - protein, 15 aa, synthetic construct
  REGION 1..15: note = Description of Artificial Sequence: Synthetic peptide
ISSDGVSIDVESVKG

SEQ ID NO: 1229 - protein, 16 aa, synthetic construct
  REGION 1..16: note = Description of Artificial Sequence: Synthetic peptide
ISWSGGNTYYADSVKG

SEQ ID NO: 1230 - protein, 16 aa, synthetic construct
  REGION 1..16: note = Description of Artificial Sequence: Synthetic peptide
MSWSGGSTYYADSVKG

SEQ ID NO: 1231 - protein, 16 aa, synthetic construct
  REGION 1..16: note = Description of Artificial Sequence: Synthetic peptide
ISWSGSSTYYADSVKG

SEQ ID NO: 1232-1253 - skipped (22 entries)

SEQ ID NO: 1254 - protein, 17 aa, synthetic construct
  REGION 1..17: note = Description of Artificial Sequence: Synthetic peptide
AQVSRAYDGIWYSGGDY

SEQ ID NO: 1255 - protein, 17 aa, synthetic construct
  REGION 1..17: note = Description of Artificial Sequence: Synthetic peptide
AQVARAYDSKWYSGGDY

SEQ ID NO: 1256 - protein, 17 aa, synthetic construct
  REGION 1..17: note = Description of Artificial Sequence: Synthetic peptide
AQVARAYDGNWYSGGDY

SEQ ID NO: 1257 - protein, 17 aa, synthetic construct
  REGION 1..17: note = Description of Artificial Sequence: Synthetic peptide
GQVARAYDGNWYSRGDY

SEQ ID NO: 1258 - protein, 17 aa, synthetic construct
  REGION 1..17: note = Description of Artificial Sequence: Synthetic peptide
AQVSRAYDGRWYSAVDY

SEQ ID NO: 1259 - protein, 17 aa, synthetic construct
  REGION 1..17: note = Description of Artificial Sequence: Synthetic peptide
GQVARAYDSSWYSRGDY

SEQ ID NO: 1260 - protein, 17 aa, synthetic construct
  REGION 1..17: note = Description of Artificial Sequence: Synthetic peptide
AQVARAYDSRWYSGGDY

SEQ ID NO: 1261 - protein, 17 aa, synthetic construct
  REGION 1..17: note = Description of Artificial Sequence: Synthetic peptide
GQVARAYDSSWYSRGDY

SEQ ID NO: 1262 - protein, 17 aa, synthetic construct
  REGION 1..17: note = Description of Artificial Sequence: Synthetic peptide
GQVSRAYDSMWYGRDDY

SEQ ID NO: 1263 - protein, 17 aa, synthetic construct
  REGION 1..17: note = Description of Artificial Sequence: Synthetic peptide
GQVARAYDSNWYSRGDY

SEQ ID NO: 1264 - protein, 17 aa, synthetic construct
  REGION 1..17: note = Description of Artificial Sequence: Synthetic peptide
GQVSRAYDSNWYSRDDY

SEQ ID NO: 1265 - protein, 17 aa, synthetic construct
  REGION 1..17: note = Description of Artificial Sequence: Synthetic peptide
GQVARAYDTRWYSRGDY

SEQ ID NO: 1266 - protein, 17 aa, synthetic construct
  REGION 1..17: note = Description of Artificial Sequence: Synthetic peptide
AQVARAYDSRWYSGGDY

SEQ ID NO: 1267 - protein, 17 aa, synthetic construct
  REGION 1..17: note = Description of Artificial Sequence: Synthetic peptide
GQVARAYDSRWYSRGDY

SEQ ID NO: 1268 - protein, 17 aa, synthetic construct
  REGION 1..17: note = Description of Artificial Sequence: Synthetic peptide
GQVARAYDSSWYARGDY

SEQ ID NO: 1269 - protein, 17 aa, synthetic construct
  REGION 1..17: note = Description of Artificial Sequence: Synthetic peptide
GQVARAYDSNWYSRGDY

SEQ ID NO: 1270 - protein, 17 aa, synthetic construct
  REGION 1..17: note = Description of Artificial Sequence: Synthetic peptide
VQVSRAYDGIWYSGGDY

SEQ ID NO: 1271 - protein, 18 aa, synthetic construct
  REGION 1..18: note = Description of Artificial Sequence: Synthetic peptide
ARYFTSSVVYTSGNDYDY

SEQ ID NO: 1272 - protein, 18 aa, synthetic construct
  REGION 1..18: note = Description of Artificial Sequence: Synthetic peptide
ARYFTSSVVYTSGNDYDY

SEQ ID NO: 1273 - protein, 18 aa, synthetic construct
  REGION 1..18: note = Description of Artificial Sequence: Synthetic peptide
ARYFTRDAIYTSGDDYDY

SEQ ID NO: 1274 - protein, 18 aa, synthetic construct
  REGION 1..18: note = Description of Artificial Sequence: Synthetic peptide
ARYFTRDAVYTSGDDYDY

SEQ ID NO: 1275 - protein, 18 aa, synthetic construct
  REGION 1..18: note = Description of Artificial Sequence: Synthetic peptide
ARYFTTSVVYTSGDDYDY

SEQ ID NO: 1276 - protein, 18 aa, synthetic construct
  REGION 1..18: note = Description of Artificial Sequence: Synthetic peptide
ARYFTTSVVYTSGDDYDY

SEQ ID NO: 1277 - protein, 18 aa, synthetic construct
  REGION 1..18: note = Description of Artificial Sequence: Synthetic peptide
ARYFTSSVVYTSGNDYDY

SEQ ID NO: 1278 - protein, 18 aa, synthetic construct
  REGION 1..18: note = Description of Artificial Sequence: Synthetic peptide
ARYFTRDAVYTSGDDYDY

SEQ ID NO: 1279 - protein, 18 aa, synthetic construct
  REGION 1..18: note = Description of Artificial Sequence: Synthetic peptide
ARYFTRDVVYTSGDDYDY

SEQ ID NO: 1280 - protein, 18 aa, synthetic construct
  REGION 1..18: note = Description of Artificial Sequence: Synthetic peptide
ARYFTTSVVYTSGDDYDY

SEQ ID NO: 1281 - protein, 17 aa, synthetic construct
  REGION 1..17: note = Description of Artificial Sequence: Synthetic peptide
AGGSTRVVVTTTPVVKY

SEQ ID NO: 1282 - protein, 17 aa, synthetic construct
  REGION 1..17: note = Description of Artificial Sequence: Synthetic peptide
AGGSTRVVVTTTPVVKY

SEQ ID NO: 1283 - protein, 17 aa, synthetic construct
  REGION 1..17: note = Description of Artificial Sequence: Synthetic peptide
AGGSTRVVVTTTPVVKY

SEQ ID NO: 1284 - protein, 17 aa, synthetic construct
  REGION 1..17: note = Description of Artificial Sequence: Synthetic peptide
AGGSTRVVVTTTPVVKY

SEQ ID NO: 1285 - protein, 17 aa, synthetic construct
  REGION 1..17: note = Description of Artificial Sequence: Synthetic peptide
AGGSTRVVVTTTPIVKY

SEQ ID NO: 1286 - protein, 17 aa, synthetic construct
  REGION 1..17: note = Description of Artificial Sequence: Synthetic peptide
AGGSTRVVVTTTPVVKY

SEQ ID NO: 1287 - protein, 12 aa, synthetic construct
  REGION 1..12: note = Description of Artificial Sequence: Synthetic peptide
RIYFGSSRGYDY

SEQ ID NO: 1288 - protein, 12 aa, synthetic construct
  REGION 1..12: note = Description of Artificial Sequence: Synthetic peptide
RTYFGSSRGYDY

SEQ ID NO: 1289 - protein, 16 aa, synthetic construct
  REGION 1..16: note = Description of Artificial Sequence: Synthetic peptide
TLRKSSGIYHVDDYDD

SEQ ID NO: 1290 - protein, 16 aa, synthetic construct
  REGION 1..16: note = Description of Artificial Sequence: Synthetic peptide
TLRKSSGIYHTDDYDY

SEQ ID NO: 1291 - protein, 13 aa, synthetic construct
  REGION 1..13: note = Description of Artificial Sequence: Synthetic peptide
GTQWSWSLRDNTS

SEQ ID NO: 1292 - protein, 13 aa, synthetic construct
  REGION 1..13: note = Description of Artificial Sequence: Synthetic peptide
GTQWSWALRDSTS

SEQ ID NO: 1293-1294 - skipped (2 entries)

SEQ ID NO: 1295 - protein, 18 aa, synthetic construct
  REGION 1..18: note = Description of Artificial Sequence: Synthetic peptide
RGRYSASYTYTNPASYKY

SEQ ID NO: 1296 - protein, 17 aa, synthetic construct
  REGION 1..17: note = Description of Artificial Sequence: Synthetic peptide
RVAQASGWRTTIKDYGY

SEQ ID NO: 1297 - protein, 17 aa, synthetic construct
  REGION 1..17: note = Description of Artificial Sequence: Synthetic peptide
GRYSGTYNSPYSSSYVY

SEQ ID NO: 1298 - protein, 12 aa, synthetic construct
  REGION 1..12: note = Description of Artificial Sequence: Synthetic peptide
AQEGSSPGPYKY

SEQ ID NO: 1299 - protein, 13 aa, synthetic construct
  REGION 1..13: note = Description of Artificial Sequence: Synthetic peptide
DRWSAVVESTPST

SEQ ID NO: 1300 - protein, 16 aa, synthetic construct
  REGION 1..16: note = Description of Artificial Sequence: Synthetic peptide
AKTGMYIDLRTSTFDY

SEQ ID NO: 1301 - protein, 11 aa, synthetic construct
  REGION 1..11: note = Description of Artificial Sequence: Synthetic peptide
SEDHGAPRYDY

SEQ ID NO: 1302 - protein, 16 aa, synthetic construct
  REGION 1..16: note = Description of Artificial Sequence: Synthetic peptide
GGSTRVVVTTTPVVKY

SEQ ID NO: 1303 - protein, 16 aa, synthetic construct
  REGION 1..16: note = Description of Artificial Sequence: Synthetic peptide
GGSTRVVVTTTPVVKY

SEQ ID NO: 1304 - skipped

SEQ ID NO: 1305 - protein, 16 aa, synthetic construct
  REGION 1..16: note = Description of Artificial Sequence: Synthetic peptide
GGSTRVVVTTTPVVKY

SEQ ID NO: 1306 - protein, 16 aa, synthetic construct
  REGION 1..16: note = Description of Artificial Sequence: Synthetic peptide
GGSTRVVVTTTPVVKY

SEQ ID NO: 1307 - protein, 16 aa, synthetic construct
  REGION 1..16: note = Description of Artificial Sequence: Synthetic peptide
GGSTRVVVTTTPVVKY

SEQ ID NO: 1308 - protein, 115 aa, synthetic construct
  REGION 1..115: note = Description of Artificial Sequence: Synthetic polypeptide
QVQLQESGGGLVQAGGSLRLSCAASGSIFSIASMGWYRQAPGKQRELVAVITSFSSTNYADSVKGRFTISRDNAKNTVYLQMNSLKPEDTGVYYCNARYFERTDWGQGTQVTVSS

SEQ ID NO: 1309 - protein, 115 aa, synthetic construct
  REGION 1..115: note = Description of Artificial Sequence: Synthetic polypeptide
QVQLQESGGGLVQAGGSLRLSCAAPGSIFSIASMGWYRQAPGKQRELVAVITSFSSTNYADSVKGRFTISRDNAKNTVYLQMNSLKPEDTGVYYCNARYFERTDWGQGTQVTVSS

SEQ ID NO: 1310 - protein, 115 aa, synthetic construct
  REGION 1..115: note = Description of Artificial Sequence: Synthetic polypeptide
QVQLQESGGGLVQAGGSLRLSCAASGSIFSIASMAWYRQAPGKQRELVAAITSFSSTNYADSVKGRFTISRDNAKNTVYLQMNSLKPEDTGVYYCNARYFERTDWGQGTQVTVSS

SEQ ID NO: 1311 - protein, 115 aa, synthetic construct
  REGION 1..115: note = Description of Artificial Sequence: Synthetic polypeptide
QVQLQESGGGLVQAGGSLRLSCAASESIFSINVMAWHRQAPGKQRELVARITSGGSTNYADSVKGRFTISRDNAKNTVYLQMNSLKPEDTGVYYCGAYQGLYAYWGQGTQVTVSS

SEQ ID NO: 1312 - protein, 115 aa, synthetic construct
  REGION 1..115: note = Description of Artificial Sequence: Synthetic polypeptide
QVQLQESGGGLVQAGGSLRLSCVASGSSFSITSMAWYRQAPGKQRDLVAAITSFGSTNYADSVKDRFTISRDNAKNTVYLQMNSLKPEDTAVYYCNGRVFDHVYWGQGTQVTVSS

SEQ ID NO: 1313 - protein, 115 aa, synthetic construct
  REGION 1..115: note = Description of Artificial Sequence: Synthetic polypeptide
QVQLQESGGGLVQAGGSLKLSCAASSSIFSISSMSWYRQAPGKQRELVAAITTFDYTNYADSVKGRFTISRDNAKNMMYLQMNSLKPEDTAVYLCNARAFGRDYWGQGTQVTVSS

SEQ ID NO: 1314 - protein, 115 aa, synthetic construct
  REGION 1..115: note = Description of Artificial Sequence: Synthetic polypeptide
QVQLQESGGGLVQAGGSLKLSCAASSSIFSISSMSWYRQAPGKQRELVAAITSFGSTNYADSVKGRFTISRDNAKNMMYLQMNSLKPEDTAVYRCNARTMGRDYWGQGTQVTVSS

SEQ ID NO: 1315 - protein, 116 aa, synthetic construct
  REGION 1..116: note = Description of Artificial Sequence: Synthetic polypeptide
QVQLQESGGGLVQPGGSLRLSCAASGSTLNIKIMAWHRQAPGKQRELVATLTSGGNTNYADSVKGRFTISRDNAKNTVYLQMNSLQPEDTAVYYCGLWDGVGGAYWGRGTQVTVSS

SEQ ID NO: 1316 - protein, 116 aa, synthetic construct
  REGION 1..116: note = Description of Artificial Sequence: Synthetic polypeptide
QVQLQESGGGLVQPGGSLRISCAASGSTLNIKIMAWHRQAPGKQRELVATLTSGGNTNYADSVKGRFTISRDNAKNTVYLQMNSLQPEDTAVYYCGLWDGVGGAYWGRGTQVTVSS

SEQ ID NO: 1317 - protein, 116 aa, synthetic construct
  REGION 1..116: note = Description of Artificial Sequence: Synthetic polypeptide
QVQLQESGGGLVQAGGSLRLSCAASGSTFNIKTMAWHRQAPGNQRELVATLTSGGNTNYADSVKGRFTISRDNAKNTVYLQMNSLKPEDTAVYYCGLWNGVGGAYWGRGTQVTVSS

SEQ ID NO: 1318 - protein, 115 aa, synthetic construct
  REGION 1..115: note = Description of Artificial Sequence: Synthetic polypeptide
QVQLQDGGGLVQPGGSLRLSCAASGSTFNIKLMAWHRQAPGNQRELVATLTSGGNTNYADSVKGRFTISRDNASNIVYLQMNSLKPEDTAVYYCGLWDGVGGAYWGRGTQVTVSS

SEQ ID NO: 1319 - protein, 116 aa, synthetic construct
  REGION 1..116: note = Description of Artificial Sequence: Synthetic polypeptide
QVQLQESGGGLVQAGGSLRLSCAASGSTFNFKIMAWHRQAPGKQRELVASLTSEGLTNYRDSVKGRFTISRDNAKNTVYLQMNNLKPEDTAVYYCGLWDGVGGAYWGRGTQVTVSS

SEQ ID NO: 1320 - protein, 114 aa, synthetic construct
  REGION 1..114: note = Description of Artificial Sequence: Synthetic polypeptide
QVQLQESGGGLVQPGGSLRLSCAASGFMFSSYSMSWYRQAPGKQRELVAAITTWGSTNYADSVKGRFTISRDNAKNTVWLQMNSLEPEDTAVYFCNARSWNNYWGQGTQVTVSS

SEQ ID NO: 1321 - protein, 114 aa, synthetic construct
  REGION 1..114: note = Description of Artificial Sequence: Synthetic polypeptide
QVQLQESGGGLVQVGGSLRLSCAASGFMFSSYSMSWYRQAPGKQRELVAAITSYGSTNYADSVKGRFTISRDNAKNTVWLQMNSLKPEDTAVYFCNARSWNNYWGQGTQVTVSS

SEQ ID NO: 1322 - protein, 114 aa, synthetic construct
  REGION 1..114: note = Description of Artificial Sequence: Synthetic polypeptide
QVQLQESGGGLVQPGGSLRLSCAASGFTFSSHSMSWYRQAPGKQRELVAAITTYGSTNYIDSVKGRFTISRDNTKNTVYLQMNSLKPEDTAVYFCNARSWNNYWGQGTQVTVSS

SEQ ID NO: 1323 - protein, 117 aa, synthetic construct
  REGION 1..117: note = Description of Artificial Sequence: Synthetic polypeptide
QVQLQESGGGLVQAGGSLRLSCVASGSSFSHNTMGWYRQAPGKQRDLVARITTFGTTNYADSVKGRFTISRDNAKNTVYLQMNSLKPEDTAVYYCNGESFGRIWYNWGQGTQVTVSS

SEQ ID NO: 1324 - protein, 116 aa, synthetic construct
  REGION 1..116: note = Description of Artificial Sequence: Synthetic polypeptide
QVQLQESGGGLVQAGASLRLTCTASGGRFSYATMGWSRQAPGKQREMVARITSSGFSTNYADSVKGRFTISRDNAKNAVYLQMDSLKPEDTAVYYCNAQHFGTDSWGQGTQVTVSS

SEQ ID NO: 1325 - protein, 116 aa, synthetic construct
  REGION 1..116: note = Description of Artificial Sequence: Synthetic polypeptide
QVQLQESGGGLVQAGASLRLTCTASGSRFSYATMGWSRQAPGKQRELVARITSSGFSTNYADSVKGRFTISRDNAKNAVYLQMDSLKPEDTAVYYCNAQQFGTDSWGQGTQVTVSS

SEQ ID NO: 1326 - protein, 117 aa, synthetic construct
  REGION 1..117: note = Description of Artificial Sequence: Synthetic polypeptide
QVQLQESGGGLVQAGGSLRLSCAASGSTFTSNVMGWHRQAPGKQRELVANMHSGGSTNYADSVKGRFTISRDNAKNIVYLQMNNLKIEDTAVYYCRWYGIQRAEGYWGQGTQVTVSS

SEQ ID NO: 1327 - protein, 117 aa, synthetic construct
  REGION 1..117: note = Description of Artificial Sequence: Synthetic polypeptide
QVQLQESGGGLVVAGGSLRLSCAASGSSVSFLSMAWYRQAPGKKRELVAGISVDGSTNYADSVKGRFTVSRDNAKNTVYLQMNSLQPEDTAVYYCYAYRWVGRDTYWGQGTQVTVSS

SEQ ID NO: 1328 - protein, 117 aa, synthetic construct
  REGION 1..117: note = Description of Artificial Sequence: Synthetic polypeptide
QVQLQESGGGLVVAGGSLRLSCAASGSSVSFLSMAWYRQAPGKKRELVAGISVDGSTNYADSVKGRFTISRDNAKNTVYLQMNSLQPEDTAVYYCYAYRWVGRDTYWGQGTQVTVSS

SEQ ID NO: 1329 - protein, 117 aa, synthetic construct
  REGION 1..117: note = Description of Artificial Sequence: Synthetic polypeptide
QVQLQESGGGLVVSGGSLRLSCAASGSSVSFLSMAWYRQAPGKKRELVAGISVDGSTNYADSVKGRFTISRDNAKNTVYLQMNSLQPEDTAAYYCYAYRWVGRDTYWGQGTQVTVSS

SEQ ID NO: 1330 - protein, 117 aa, synthetic construct
  REGION 1..117: note = Description of Artificial Sequence: Synthetic polypeptide
QVQLQESGGGLVVAGGSLRLSCAASGSSVSFLSMAWYRQAPGKKRELVAGISVDGSTNYADSVKGRFTISRDNAENTVYLQMNSLQPEDTAVYYCYAYRWEGRDTYWGQGTQVTVSS

SEQ ID NO: 1331 - protein, 117 aa, synthetic construct
  REGION 1..117: note = Description of Artificial Sequence: Synthetic polypeptide
QVQLQESGGGLVVAGGSLRLSCAASGSSVSFLSMAWYRQAPGKKRELVAGISVDGSTNYADSVKGRFTISRDNAENTVYLQMNSLQPEDTAVYYCYAYRWEGRNTYWGQGTQVTVSS

SEQ ID NO: 1332 - protein, 117 aa, synthetic construct
  REGION 1..117: note = Description of Artificial Sequence: Synthetic polypeptide
QVQLQESGGGLVQPGGSLRLSCAASGSSVSFLSMAWYRQAPGKKRELVAGISTDGSTNYVDSVKGRFTISRDNAKNTVYLQMNSLQPEDTAVYYCYAYRWVGRYTYWGQGTQVTVSS

SEQ ID NO: 1333 - protein, 117 aa, synthetic construct
  REGION 1..117: note = Description of Artificial Sequence: Synthetic polypeptide
QVQLQESGGGLVVAGGSLRLSCAASGSSVSFLSMAWYRQAPGKKRELVAGISTDGTTNYVDSVKDRFTISRDNAKNTVYLQMNSLQPEDTAAYYCYAYRWVGRDTYWGQGTQVTVSS

SEQ ID NO: 1334 - protein, 117 aa, synthetic construct
  REGION 1..117: note = Description of Artificial Sequence: Synthetic polypeptide
QVQLQESGGGLVVAGGSLRLSCAASGSSVSFLSIAWYRQAPGKKRELVAGISTDGTTNYVDSVKDRFTISRDNAKNTVYLQMNSLQPEDTAAYYCYAYRWVGRDTYWGQGTQVTVSS

SEQ ID NO: 1335 - protein, 117 aa, synthetic construct
  REGION 1..117: note = Description of Artificial Sequence: Synthetic polypeptide
QVQLQESGGGLVQAGGSLTLSCAASGSSVSFLSMAWYRQAPGKKRELVAGISTDGTTNYVDSVKDRFTISRDNAKNTVYLQMNSLQPEDTAAYYCYAYRWVGRDTYWGQGTQVTVSS

SEQ ID NO: 1336 - protein, 117 aa, synthetic construct
  REGION 1..117: note = Description of Artificial Sequence: Synthetic polypeptide
QVQLQESGGGLVQAGGSLRLSCAASGSSVSFLSMAWYRQAPGKKRELVAGISTDGSTNYADSVKGRFTISEGNAKNTVDLQMNSLQPEDTAVYYCYAYRWVDRYTYWGQGTQVTVSS

SEQ ID NO: 1337 - protein, 117 aa, synthetic construct
  REGION 1..117: note = Description of Artificial Sequence: Synthetic polypeptide
QVQLQESGGGLVVAGGSLRLSCAASGSSVSFLSMAWYRQAPGKKRELVAGISTDGSTNYADSVKGRFTISEDNAKNTVDLQMNSLQPEDTAVYYCYAYRWIDRYTYWGQGTQVTVSS

SEQ ID NO: 1338 - protein, 117 aa, synthetic construct
  REGION 1..117: note = Description of Artificial Sequence: Synthetic polypeptide
QVQLQESGGGLVQPGGSLRLSCAASGSSVSFLSMAWYRQAPGKKRELVAGISTDGSTNYADSVKGRFTISEDNAKNTVDLQMNSLQPEDTAVYYCYAYRWVDRYTYWGQGTQVTVSS

SEQ ID NO: 1339 - protein, 117 aa, synthetic construct
  REGION 1..117: note = Description of Artificial Sequence: Synthetic polypeptide
QVQLQESGGGLVVAGGSLRLSCAASGSSVSFLSMAWYRQAPGKKRELVAGISSDGSTNYVDSVKGRFTISRDNAKNIVFLQMNSLQPQDTAVYYCYAYRWVGRDTYWGQGTQVTVSS

SEQ ID NO: 1340 - protein, 117 aa, synthetic construct
  REGION 1..117: note = Description of Artificial Sequence: Synthetic polypeptide
QVQLQESGGGLVVAGGSLRLSCAASGSSVSFLSMAWYRQAPGKKRELVAGISADGSTDYIDSVKGRFTISRDSANNTMYLQMNSLQPEDTAVYYCYAYRWTTRYTYWGQGTQVTVSS

SEQ ID NO: 1341 - protein, 117 aa, synthetic construct
  REGION 1..117: note = Description of Artificial Sequence: Synthetic polypeptide
QVQLQESGGGLVQPGGSLRLSCAASGFTLDYYAIGWYRQAPGKKRELVAGISSDGSTHYVDSVKGRFAISRDNAENTVYLQMNDLQPDDTAVYYCYAYRWVGGYTYWGQGTQVTVSS

SEQ ID NO: 1342 - protein, 119 aa, synthetic construct
  REGION 1..119: note = Description of Artificial Sequence: Synthetic polypeptide
QVQLQESGGGLVQAGGSLRLSCVASGSTSSINAMGWYRRAPGKQRELVAGISSDGSKNYADSVKGRFTISRDNAKNTVYLQMNSLKPEDTAVYYCYYFRTVAASSMQYWGQGTQVTVSS

SEQ ID NO: 1343 - protein, 119 aa, synthetic construct
  REGION 1..119: note = Description of Artificial Sequence: Synthetic polypeptide
QVQLQESGGGLVQAGGSLRLSCVASGSTSSINAMGWYRRAPGKQRELVAGISSDGSKVYADSVKGRFTISRDNAKNTVYLQMNSLKPEDTAVFYCYYFRTVSGSSMRYWGQGTQVTVSS

SEQ ID NO: 1344 - protein, 118 aa, synthetic construct
  REGION 1..118: note = Description of Artificial Sequence: Synthetic polypeptide
QVQLQESGGGLVQAGGSLRLSCAASGITSSVYSMGWYRQAPGKQRELVAGSSSDGSTHYVDSVRGRFTISRDNAKNTVYLQMSSLKPEDTAVYYCYANRGFAGAPSYWGQGTQVTVSS

SEQ ID NO: 1345 - protein, 114 aa, synthetic construct
  REGION 1..114: note = Description of Artificial Sequence: Synthetic polypeptide
QVQLQESGGGLVQAGGSLRLSCAASGRTSMFNSMGWHRQAPGKQRELVAIIRSGGSSNYADTVKGRFTISRDNTKNTVYLQMNDLKPEDTAVYYCFYYFQSSYWGQGTQVTVSS

SEQ ID NO: 1346 - protein, 114 aa, synthetic construct
  REGION 1..114: note = Description of Artificial Sequence: Synthetic polypeptide
QVQLQESGGGLVQAGGSLRLSCAASGRTSMVNSMGWHRQAPGKQRELVALITSGGSSNYADTVKGRFTISRDNTKNTVYLQMNDLKPEDTAVYYCFYYFQSSYWGQGTQVTVSS

SEQ ID NO: 1347 - protein, 114 aa, synthetic construct
  REGION 1..114: note = Description of Artificial Sequence: Synthetic polypeptide
QVQLQESGGGLVQAGGSLRLSCAASGSVSMFNSMGWHRQPPGKQRELVAIITSGGSSNYADTVKGRFTISRDNTKNTVYLQMNDLKPEDTAVYYCFYYFQSSYWGQGTQVTVSS

SEQ ID NO: 1348 - protein, 119 aa, synthetic construct
  REGION 1..119: note = Description of Artificial Sequence: Synthetic polypeptide
QVQLQESGGGLVQAGGSLRLSCTASGSIFSIAVMGWYRQVPGKRREWVATIFDGSYTNYADSVKGRFTISRDNARNKVYLQMNNLKPEDTAVYYCQTHWTQGSVPKESWGQGTQVTVSS

SEQ ID NO: 1349 - protein, 115 aa, synthetic construct
  REGION 1..115: note = Description of Artificial Sequence: Synthetic polypeptide
QVQLQESGGGLVQAGGSLRLSCVASSGIFSDMSMVWYRQAPGKQRELVASITTFGSTNYADPVKGRFTISRDNAKNTVYLQMNSLKPEDTAVYYCSGRSYSSDYWGRGTQVTVSS

SEQ ID NO: 1350 - protein, 115 aa, synthetic construct
  REGION 1..115: note = Description of Artificial Sequence: Synthetic polypeptide
QVQLQESGGGLVQAGGSLRLSCVASGSISSIIVMGWSRQAPGKQRESVATITRDGTRNYADSLKGRFTISRDNAKNTSYLQINSLKPEDTAVYSCYARYGDINYWGKGTQVTVSS

SEQ ID NO: 1351 - protein, 115 aa, synthetic construct
  REGION 1..115: note = Description of Artificial Sequence: Synthetic polypeptide
QVQLQESGGGLVQAGGSLRLSCVASGSISSIIVMGWSRQAPGKQRESLATISRGGTRTYADSVKGRFTISRDNAKNTSYLQMNSLKPEDTAVYSCYARYGDINYWGKGTQVTVSS

SEQ ID NO: 1352 - protein, 114 aa, synthetic construct
  REGION 1..114: note = Description of Artificial Sequence: Synthetic polypeptide
QVQLQESGGGLVQAGGSLRLSCVASGSIFTTNSMGWHRQGPGKQRELVALIGSAGSTKYADSVKGRFTISRDNAKNTVSLQMDSLKPEDTAVYYCFYYDSRSYWGQGTQVTVSS

SEQ ID NO: 1353 - protein, 114 aa, synthetic construct
  REGION 1..114: note = Description of Artificial Sequence: Synthetic polypeptide
QVQLQESGGGMVQPGGSLRLSCAASGSREISTMGWHRQAPGKQRELAARITSGGITKYADSVKGRFTISRDNAKKTVYLQMNSLKSEDTAVYYCFAYDNINAYWGQGTQVTVSS

SEQ ID NO: 1354 - protein, 114 aa, synthetic construct
  REGION 1..114: note = Description of Artificial Sequence: Synthetic polypeptide
QVQLQESGGGWVQAGGSLRLSCAASGSREISTMGWHRQAPGKQRELAARITSGGITKYADSVKGRFTISRDNAKKTVYLQMNSLKSEDTAVYYCFAYDNINAYWGQGTQVTVSS

SEQ ID NO: 1355 - protein, 114 aa, synthetic construct
  REGION 1..114: note = Description of Artificial Sequence: Synthetic polypeptide
QVQLQESGGGWVQAGGSLRLSCTASGSREISTMGWHRQAPGKQRELAARITSGGITKYADSVKGRFTISRDNAKKTVYLQMDSLKSEDTAVYYCFAYDNINAYWGQGTQVTVSS

SEQ ID NO: 1356 - protein, 114 aa, synthetic construct
  REGION 1..114: note = Description of Artificial Sequence: Synthetic polypeptide
QVQLQESGGGSVQAGRSLGLSCAASGSREISTMGWHRQAPGKQRELAARITSGGITKYADSVKGRFTISRDNAKKTVYLQMNSLKSEDTAVYYCFAYDNINAYWGQGTQVTVSS

SEQ ID NO: 1357 - protein, 115 aa, synthetic construct
  REGION 1..115: note = Description of Artificial Sequence: Synthetic polypeptide
QVQLQESGGGLVQAGGSLRLSCTASGSIFRGAAMYWHRQAPGKQRELVAAITTSGNTSYADSVKGRFTISRDNAKNTMYLQIISLKPEDTAVYYCAFWIAGKAYWGQGTQVTVSS

SEQ ID NO: 1358 - protein, 115 aa, synthetic construct
  REGION 1..115: note = Description of Artificial Sequence: Synthetic polypeptide
QVQLQESGGGLVQPGGSLRLSCAASGSISSFNFMSWHRQAPGKERELAGVITRGGATNYADSVKGRFTISRDNVKNTVYLQMNGLKPEDTAVYYCHGRSQLGSTWGQGTQVTVSS

SEQ ID NO: 1359 - protein, 116 aa, synthetic construct
  REGION 1..116: note = Description of Artificial Sequence: Synthetic polypeptide
QVQLQESGGGLVQAGGSLRLSCLASGTIFTASTMGWHRQPPGKQRELVASIAGDGRTNYAESTEGRFTISRDDAKNTMYLQMNSLKPEDTAVYYCYAYYLDTYAYWGQGTQVTVSS

SEQ ID NO: 1360 - protein, 115 aa, synthetic construct
  REGION 1..115: note = Description of Artificial Sequence: Synthetic polypeptide
EVQLVESGGGLVQPGGSLTLSCAASGSIFSIASMGWYRQAPGKQRELVAVITSFSSTNYADSVKGRFTISRDNAKNSVYLQMNSLRAEDTAVYYCNARYFERTDWGQGTLVTVSS

SEQ ID NO: 1361 - protein, 114 aa, synthetic construct
  REGION 1..114: note = Description of Artificial Sequence: Synthetic polypeptide
EVQLVESGGGLVQPGGSLTLSCAASGRTSMFNSMGWHRQAPGKQRELVAIIRSGGSSNYADTVKGRFTISRDNAKNSVYLQMNSLRAEDTAVYYCFYYFQSSYWGQGTLVTVSS

SEQ ID NO: 1362 - protein, 117 aa, synthetic construct
  REGION 1..117: note = Description of Artificial Sequence: Synthetic polypeptide
EVQLVESGGGLVQPGGSLTLSCAASGSSVSFLSMAWYRQAPGKKRELVAGISVDGSTNYADSVKGRFTISRDNAKNSVYLQMNSLRAEDTAVYYCYAYRWVGRDTYWGQGTLVTVSS

SEQ ID NO: 1363 - protein, 115 aa, synthetic construct
  REGION 1..115: note = Description of Artificial Sequence: Synthetic polypeptide
EVQLVESGGGLVQPGGSLTLSCTASGSIFRGAAMYWHRQAPGKQRELVAAITTSGNTSYADSVKGRFTISRDNAKNSMYLQMNSLRAEDTAVYYCAFWIAGKAYWGQGTLVTVSS

SEQ ID NO: 1364 - protein, 116 aa, synthetic construct
  REGION 1..116: note = Description of Artificial Sequence: Synthetic polypeptide
EVQLVESGGGLVQPGGSLTLSCAASGSTFNIKTMAWHRQAPGNQRELVATLTSGGNTNYADSVKGRFTISRDNAKNSVYLQMNSLRAEDTAVYYCGLWNGVGGAYWGQGTLVTVSS

SEQ ID NO: 1365 - protein, 116 aa, synthetic construct
  REGION 1..116: note = Description of Artificial Sequence: Synthetic polypeptide
EVQLVESGGGLVQPGGSLTLSCAASGSTLNIKIMAWHRQAPGKQRELVATLTSGGNTNYADSVKGRFTISRDNAKNSVYLQMNSLRAEDTAVYYCGLWDGVGGAYWGQGTLVTVSS

SEQ ID NO: 1366 - protein, 115 aa, synthetic construct
  REGION 1..115: note = Description of Artificial Sequence: Synthetic polypeptide
EVQLVESGGGLVQPGGSLTLSCAASSSIFSISSMSWYRQAPGKQRELVAAITTFDYTNYADSVKGRFTISRDNAKNSMYLQMNSLRAEDTAVYYCNARAFGRDYWGQGTLVTVSS

SEQ ID NO: 1367 - protein, 119 aa, synthetic construct
  REGION 1..119: note = Description of Artificial Sequence: Synthetic polypeptide
EVQLVESGGGLVQPGGSLTLSCVASGSTSSINAMGWYRRAPGKQRELVAGISSDGSKNYADSVKGRFTISRDNAKNSVYLQMNSLRAEDTAVYYCYYFRTVAASSMQYWGQGTLVTVSS

SEQ ID NO: 1368 - protein, 114 aa, synthetic construct
  REGION 1..114: note = Description of Artificial Sequence: Synthetic polypeptide
EVQLVESGGGLVQPGGSLTLSCAASGFMFSSYSMSWYRQAPGKQRELVAAITSYGSTNYADSVKGRFTISRDNAKNSVYLQMNSLRAEDTAVYYCNARSWNNYWGQGTLVTVSS

SEQ ID NO: 1369 - protein, 114 aa, synthetic construct
  REGION 1..114: note = Description of Artificial Sequence: Synthetic polypeptide
EVQLVESGGGLVQPGGSLTLSCAASGSVSMFNSMGWHRQPPGKQRELVAIITSGGSSNYADTVKGRFTISRDNAKNSVYLQMNSLRAEDTAVYYCFYYFQSSYWGQGTLVTVSS

SEQ ID NO: 1370 - protein, 116 aa, synthetic construct
  REGION 1..116: note = Description of Artificial Sequence: Synthetic polypeptide
EVQLVESGGGLVQPGGSLTLSCTASGGRFSYATMGWSRQAPGKQREMVARITSSGFSTNYADSVKGRFTISRDNAKNSVYLQMNSLRAEDTAVYYCNAQHFGTDSWGQGTLVTVSS

SEQ ID NO: 1371 - protein, 115 aa, synthetic construct
  REGION 1..115: note = Description of Artificial Sequence: Synthetic polypeptide
EVQLVESGGGLVQPGGSLTLSCAASGSISSFNFMSWHRQAPGKERELAGVITRGGATNYADSVKGRFTISRDNAKNSVYLQMNSLRAEDTAVYYCHGRSQLGSTWGQGTLVTVSS

SEQ ID NO: 1372 - protein, 115 aa, synthetic construct
  REGION 1..115: note = Description of Artificial Sequence: Synthetic polypeptide
EVQLVESGGGLVQPGGSLTLSCAASESIFSINVMAWHRQAPGKQRELVARITSGGSTNYADSVKGRFTISRDNAKNSVYLQMNSLRAEDTAVYYCGAYQGLYAYWGQGTLVTVSS

SEQ ID NO: 1373 - protein, 114 aa, synthetic construct
  REGION 1..114: note = Description of Artificial Sequence: Synthetic polypeptide
EVQLVESGGGLVQPGGSLTLSCAASGSREISTMGWHRQAPGKQRELAARITSGGITKYADSVKGRFTISRDNAKNSVYLQMNSLRAEDTAVYYCFAYDNINAYWGQGTLVTVSS

SEQ ID NO: 1374 - protein, 119 aa, synthetic construct
  REGION 1..119: note = Description of Artificial Sequence: Synthetic polypeptide
EVQLVESGGGLVQPGGSLTLSCTASGSIFSIAVMGWYRQVPGKRREWVATIFDGSYTNYADSVKGRFTISRDNAKNSVYLQMNSLRAEDTAVYYCQTHWTQGSVPKESWGQGTLVTVSS

SEQ ID NO: 1375 - protein, 119 aa, synthetic construct
  REGION 1..119: note = Description of Artificial Sequence: Synthetic polypeptide
EVQLVESGGGLVQPGGSLTLSCVASGSTSSINAMGWYRRAPGKQRELVAGISSDGSKVYADSVKGRFTISRDNAKNSVYLQMNSLRAEDTAVYYCYYFRTVSGSSMRYWGQGTLVTVSS

SEQ ID NO: 1376 - protein, 115 aa, synthetic construct
  REGION 1..115: note = Description of Artificial Sequence: Synthetic polypeptide
EVQLVESGGGLVQPGGSLTLSCVASSGIFSDMSMVWYRQAPGKQRELVASITTFGSTNYADPVKGRFTISRDNAKNSVYLQMNSLRAEDTAVYYCSGRSYSSDYWGQGTLVTVSS

SEQ ID NO: 1377 - protein, 114 aa, synthetic construct
  REGION 1..114: note = Description of Artificial Sequence: Synthetic polypeptide
EVQLVESGGGLVQPGGSLTLSCAASGFMFSSYSMSWYRQAPGKQRELVAAITTWGSTNYADSVKGRFTISRDNAKNSVYLQMNSLRAEDTAVYYCNARSWNNYWGQGTLVTVSS

SEQ ID NO: 1378 - protein, 116 aa, synthetic construct
  REGION 1..116: note = Description of Artificial Sequence: Synthetic polypeptide
EVQLVESGGGLVQPGGSLTLSCTASGSRFSYATMGWSRQAPGKQRELVARITSSGFSTNYADSVKGRFTISRDNAKNSVYLQMNSLRAEDTAVYYCNAQQFGTDSWGQGTLVTVSS

SEQ ID NO: 1379 - protein, 117 aa, synthetic construct
  REGION 1..117: note = Description of Artificial Sequence: Synthetic polypeptide
EVQLVESGGGLVQPGGSLTLSCAASGSTFTSNVMGWHRQAPGKQRELVANMHSGGSTNYADSVKGRFTISRDNAKNSVYLQMNSLRAEDTAVYYCRWYGIQRAEGYWGQGTLVTVSS

SEQ ID NO: 1380 - protein, 117 aa, synthetic construct
  REGION 1..117: note = Description of Artificial Sequence: Synthetic polypeptide
EVQLVESGGGLVQPGGSLTLSCAASGSSVSFLSMAWYRQAPGKKRELVAGISTDGSTNYVDSVKGRFTISRDNAKNSVYLQMNSLRAEDTAVYYCYAYRWVGRYTYWGQGTLVTVSS

SEQ ID NO: 1381 - protein, 115 aa, synthetic construct
  REGION 1..115: note = Description of Artificial Sequence: Synthetic polypeptide
EVQLVESGGGLVQPGGSLTLSCVASGSISSIIVMGWSRQAPGKQRESVATITRDGTRNYADSLKGRFTISRDNAKNSSYLQMNSLRAEDTAVYYCYARYGDINYWGQGTLVTVSS

SEQ ID NO: 1382 - protein, 117 aa, synthetic construct
  REGION 1..117: note = Description of Artificial Sequence: Synthetic polypeptide
EVQLVESGGGLVQPGGSLTLSCAASGSSVSFLSMAWYRQAPGKKRELVAGISADGSTDYIDSVKGRFTISRDNAKNSVYLQMNSLRAEDTAVYYCYAYRWTTRYTYWGQGTLVTVSS

SEQ ID NO: 1383 - protein, 116 aa, synthetic construct
  REGION 1..116: note = Description of Artificial Sequence: Synthetic polypeptide
EVQLVESGGGLVQPGGSLTLSCLASGTIFTASTMGWHRQPPGKQRELVASIAGDGRTNYAESTEGRFTISRDNAKNSMYLQMNSLRAEDTAVYYCYAYYLDTYAYWGQGTLVTVSS

SEQ ID NO: 1384 - protein, 117 aa, synthetic construct
  REGION 1..117: note = Description of Artificial Sequence: Synthetic polypeptide
EVQLVESGGGLVQPGGSLTLSCAASGSSVSFLSMAWYRQAPGKKRELVAGISVDGSTNYADSVKGRFTISRDNAKNSVYLQMNSLRAEDTAVYYCYAYRWEGRNTYWGQGTLVTVSS

SEQ ID NO: 1385 - protein, 117 aa, synthetic construct
  REGION 1..117: note = Description of Artificial Sequence: Synthetic polypeptide
EVQLVESGGGLVQPGGSLTLSCVASGSSFSHNTMGWYRQAPGKQRDLVARITTFGTTNYADSVKGRFTISRDNAKNSVYLQMNSLRAEDTAVYYCNGESFGRIWYNWGQGTLVTVSS

SEQ ID NO: 1386 - protein, 115 aa, synthetic construct
  REGION 1..115: note = Description of Artificial Sequence: Synthetic polypeptide
EVQLVESGGGLVQPGGSLTLSCVASGSISSIIVMGWSRQAPGKQRESLATISRGGTRTYADSVKGRFTISRDNAKNSSYLQMNSLRAEDTAVYYCYARYGDINYWGQGTLVTVSS

SEQ ID NO: 1387 - protein, 115 aa, synthetic construct
  REGION 1..115: note = Description of Artificial Sequence: Synthetic polypeptide
EVQLVESGGGLVQPGGSLTLSCVASGSSFSITSMAWYRQAPGKQRDLVAAITSFGSTNYADSVKDRFTISRDNAKNSVYLQMNSLRAEDTAVYYCNGRVFDHVYWGQGTLVTVSS

SEQ ID NO: 1388 - protein, 114 aa, synthetic construct
  REGION 1..114: note = Description of Artificial Sequence: Synthetic polypeptide
EVQLVESGGGLVQPGGSLTLSCAASGRTSMVNSMGWHRQAPGKQRELVALITSGGSSNYADTVKGRFTISRDNAKNSVYLQMNSLRAEDTAVYYCFYYFQSSYWGQGTLVTVSS

SEQ ID NO: 1389 - protein, 116 aa, synthetic construct
  REGION 1..116: note = Description of Artificial Sequence: Synthetic polypeptide
EVQLVESGGGLVQPGGSLTLSCAASGSTFNFKIMAWHRQAPGKQRELVASLTSEGLTNYRDSVKGRFTISRDNAKNSVYLQMNSLRAEDTAVYYCGLWDGVGGAYWGQGTLVTVSS

SEQ ID NO: 1390 - protein, 117 aa, synthetic construct
  REGION 1..117: note = Description of Artificial Sequence: Synthetic polypeptide
EVQLVESGGGLVQPGGSLTLSCAASGFTLDYYAIGWYRQAPGKKRELVAGISSDGSTHYVDSVKGRFTISRDNAKNSVYLQMNSLRAEDTAVYYCYAYRWVGGYTYWGQGTLVTVSS

SEQ ID NO: 1391 - protein, 114 aa, synthetic construct
  REGION 1..114: note = Description of Artificial Sequence: Synthetic polypeptide
EVQLVESGGGLVQPGGSLTLSCVASGSIFTTNSMGWHRQGPGKQRELVALIGSAGSTKYADSVKGRFTISRDNAKNSVYLQMNSLRAEDTAVYYCFYYDSRSYWGQGTLVTVSS

SEQ ID NO: 1392 - protein, 118 aa, synthetic construct
  REGION 1..118: note = Description of Artificial Sequence: Synthetic polypeptide
EVQLVESGGGLVQPGGSLTLSCAASGITSSVYSMGWYRQAPGKQRELVAGSSSDGSTHYVDSVRGRFTISRDNAKNSVYLQMNSLRAEDTAVYYCYANRGFAGAPSYWGQGTLVTVSS

SEQ ID NO: 1393 - protein, 115 aa, synthetic construct
  REGION 1..115: note = Description of Artificial Sequence: Synthetic polypeptide
EVQLVESGGGLVQPGGSLTLSCAASSSIFSISSMSWYRQAPGKQRELVAAITSFGSTNYADSVKGRFTISRDNAKNSMYLQMNSLRAEDTAVYYCNARTMGRDYWGQGTLVTVSS

SEQ ID NO: 1394 - protein, 119 aa, synthetic construct
  REGION 1..119: note = Description of Artificial Sequence: Synthetic polypeptide
EVQLVESGGGLVQPGGSLTLSCVASGFTSSINAMGWYRRAPGKQRELVAGISSDGSFVYADSVKGRFTISRDNAKNSVYLQMNSLRAEDTAVYYCYYFRHVSGSSMRYWGQGTLVTVSS

SEQ ID NO: 1395 - protein, 119 aa, synthetic construct
  REGION 1..119: note = Description of Artificial Sequence: Synthetic polypeptide
EVQLVESGGGLVQPGGSLTLSCVASGSTSSINAMAWYRRAPGKQRELVAGISSDGSKVYADSVKGRFTISRDNAKNSVYLQMNSLRAEDTAVYYCYYFRTVSGSSSRYWGQGTLVTVSS

SEQ ID NO: 1396 - protein, 119 aa, synthetic construct
  REGION 1..119: note = Description of Artificial Sequence: Synthetic polypeptide
EVQLVESGGGLVQPGGSLTLSCVASGSTSSINAMGWYRRAPGKQRELVAGISSDGSKVYEDSVKGRFTISRDNAKNSVYLQMNSLRAEDTAVYYCYYFRTVSGSSMRYWGQGTLVTVSS

SEQ ID NO: 1397 - protein, 119 aa, synthetic construct
  REGION 1..119: note = Description of Artificial Sequence: Synthetic polypeptide
EVQLVESGGGLVQPGGSLTLSCVASGSPSSINAMGWYRRAPGKQRELSAGISSDGSKVYADSVKGRFTISRDNAKNSVYLQMNSLRAEDTAVYYCYYFRTVRGSSMSYWGQGTLVTVSS

SEQ ID NO: 1398 - protein, 119 aa, synthetic construct
  REGION 1..119: note = Description of Artificial Sequence: Synthetic polypeptide
EVQLVESGGGLVQPGGSLTLSCVASGSTSSINAMGWYRRAPGKQRELAAGISSDGSSVYADSVKGRFTISRDNAKNSVYLQMNSLRAEDTAVYYCYYFRTVSGSSKRYWGQGTLVTVSS

SEQ ID NO: 1399 - protein, 119 aa, synthetic construct
  REGION 1..119: note = Description of Artificial Sequence: Synthetic polypeptide
EVQLVESGGGLVQPGGSLTLSCVASGSISSINAMGWYRRAPGKQRELVAGISSDGSKVYADSVKGRFTISRDNAKNSVYLQMNSLRAEDTAVYYCYYFRMVSGSSMRYWGQGTLVTVSS

SEQ ID NO: 1400 - protein, 119 aa, synthetic construct
  REGION 1..119: note = Description of Artificial Sequence: Synthetic polypeptide
EVQLVESGGGLVQPGGSLTLSCVASGSTSSINAMAWYRRAPGKQRELVAGISSDGSKLYADSVKGRFTISRDNAKNSVYLQMNSLRAEDTAVYYCYYFRTVQGSSMRYWGQGTLVTVSS

SEQ ID NO: 1401 - protein, 119 aa, synthetic construct
  REGION 1..119: note = Description of Artificial Sequence: Synthetic polypeptide
EVQLVESGGGLVQPGGSLTLSCVASGSTSSINAYGWYRRAPGKQRELVAGISSDGSKVYADSVKGRFTISRDNAKNSVYLQMNSLRAEDTAVYYCYYFRTVYGSSMRYWGQGTLVTVSS

SEQ ID NO: 1402 - protein, 119 aa, synthetic construct
  REGION 1..119: note = Description of Artificial Sequence: Synthetic polypeptide
EVQLVESGGGLVQPGGSLTLSCVASGSTSSINAIGWYRRAPGKQRELVAGISSDGSKVYIDSVKGRFTISRDNAKNSVYLQMNSLRAEDTAVYYCYYFRTVSGSSYRYWGQGTLVTVSS

SEQ ID NO: 1403 - protein, 119 aa, synthetic construct
  REGION 1..119: note = Description of Artificial Sequence: Synthetic polypeptide
EVQLVESGGGLVQPGGSLTLSCVASGSTSSINAMAWYRRAPGKQRELVAGISSDGSKVYSDSVKGRFTISRDNAKNSVYLQMNSLRAEDTAVYYCYYFRTVLGSSMRYWGQGTLVTVSS

SEQ ID NO: 1404 - protein, 119 aa, synthetic construct
  REGION 1..119: note = Description of Artificial Sequence: Synthetic polypeptide
EVQLVESGGGLVQPGGSLTLSCVASGSTSIINAMGWYRRAPGKQRELAAGISSDGSKVIADSVKGRFTISRDNAKNSVYLQMNSLRAEDTAVYYCYYFRRVSGSSMRYWGQGTLVTVSS

SEQ ID NO: 1405 - protein, 119 aa, synthetic construct
  REGION 1..119: note = Description of Artificial Sequence: Synthetic polypeptide
EVQLVESGGGLVQPGGSLTLSCVASGSTSSINAMGWYRRAPGKQRELVAGISSDGSKIYADSVKGRFTISRDNAKNSVYLQMNSLRAEDTAVYYCYYFRTVSGSSMRYWGQGTLVTVSS

SEQ ID NO: 1406 - protein, 119 aa, synthetic construct
  REGION 1..119: note = Description of Artificial Sequence: Synthetic polypeptide
EVQLVESGGGLVQPGGSLTLSCVASGKTSSINAMAWYRRAPGKQRELVAGISSDGSKVYTDSVKGRFTISRDNAKNSVYLQMNSLRAEDTAVYYCYYFRTVSGSSARYWGQGTLVTVSS

SEQ ID NO: 1407 - protein, 119 aa, synthetic construct
  REGION 1..119: note = Description of Artificial Sequence: Synthetic polypeptide
EVQLVESGGGLVQPGGSLTLSCVASGTTSSINAMGWYRRAPGKQRELVAGISSDGSLVYADSVKGRFTISRDNAKNSVYLQMNSLRAEDTAVYYCYYFRIVRGSSMRYWGQGTLVTVSS

SEQ ID NO: 1408 - protein, 119 aa, synthetic construct
  REGION 1..119: note = Description of Artificial Sequence: Synthetic polypeptide
EVQLVESGGGLVQPGGSLTLSCVASGSTSSINAMAWYRRAPGKQRELVAGISSDGSKVYADSVKGRFTISRDNAKNSVYLQMNSLRAEDTAVYYCYYYRTVSGSSMRYWGQGTLVTVSS

SEQ ID NO: 1409 - protein, 119 aa, synthetic construct
  REGION 1..119: note = Description of Artificial Sequence: Synthetic polypeptide
EVQLVESGGGLVQPGGSLTLSCVASGSGSSINAMGWYRRAPGKQRELVAGISSDGSKVYSDSVKGRFTISRDNAKNSVYLQMNSLRAEDTAVYYCYYFRHVSGSSMRYWGQGTLVTVSS

SEQ ID NO: 1410 - protein, 119 aa, synthetic construct
  REGION 1..119: note = Description of Artificial Sequence: Synthetic polypeptide
EVQLVESGGGLVQPGGSLTLSCVASGTTSSINAMGWYRRAPGKQRELVAGISSDGSKVYVDSVKGRFTISRDNAKNSVYLQMNSLRAEDTAVYYCYYFRFVSGSSMRYWGQGTLVTVSS

SEQ ID NO: 1411 - protein, 119 aa, synthetic construct
  REGION 1..119: note = Description of Artificial Sequence: Synthetic polypeptide
EVQLVESGGGLVQPGGSLTLSCVASGSTSSINAMAWYRRAPGKQRELVAGISSDGSKVYVDSVKGRFTISRDNAKNSVYLQMNSLRAEDTAVYYCYYFRTVSGSSMRYWGQGTLVTVSS

SEQ ID NO: 1412 - protein, 119 aa, synthetic construct
  REGION 1..119: note = Description of Artificial Sequence: Synthetic polypeptide
EVQLVESGGGLVQPGGSLTLSCVASGSTSRINAMGWYRRAPGKQRELVAGISSDGSKVYADSVKGRFTISRDNAKNSVYLQMNSLRAEDTAVYYCYYFRTKSGSSMRYWGQGTLVTVSS

SEQ ID NO: 1413 - protein, 119 aa, synthetic construct
  REGION 1..119: note = Description of Artificial Sequence: Synthetic polypeptide
EVQLVESGGGLVQPGGSLTLSCVASGSTSRINAMGWYRRAPGKQRELVAGISSDGSKVYADSVKGRFTISRDNAKNSVYLQMNSLRAEDTAVYYCYYFRTVYGSSMRYWGQGTLVTVSS

SEQ ID NO: 1414 - protein, 119 aa, synthetic construct
  REGION 1..119: note = Description of Artificial Sequence: Synthetic polypeptide
EVQLVESGGGLVQPGGSLTLSCVASGSTSSINAMGWYRRAPGKQRELVAGISSDGSKVYRDSVKGRFTISRDNAKNSVYLQMNSLRAEDTAVYYCYYFRTVSGSSMGYWGQGTLVTVSS

SEQ ID NO: 1415 - protein, 119 aa, synthetic construct
  REGION 1..119: note = Description of Artificial Sequence: Synthetic polypeptide
EVQLVESGGGLVQPGGSLTLSCVASGSTSSINAMAWYRRAPGKQRELVAGISSDGSKVYSDSVKGRFTISRDNAKNSVYLQMNSLRAEDTAVYYCYYFRTVSGSSMRSWGQGTLVTVSS

SEQ ID NO: 1416 - protein, 119 aa, synthetic construct
  REGION 1..119: note = Description of Artificial Sequence: Synthetic polypeptide
EVQLVESGGGLVQPGGSLTLSCVASGSTSSINAMAWYRRAPGKQRELVAGISSDNSKVYADSVKGRFTISRDNAKNSVYLQMNSLRAEDTAVYYCYYFRTVGGSSMRYWGQGTLVTVSS

SEQ ID NO: 1417 - protein, 119 aa, synthetic construct
  REGION 1..119: note = Description of Artificial Sequence: Synthetic polypeptide
EVQLVESGGGLVQPGGSLTLSCVASGNTSSINAMAWYRRAPGKQRELVAGISSDGSKVYADSVKGRFTISRDNAKNSVYLQMNSLRAEDTAVYYCYYFRTVSGSSMRYWGQGTLVTVSS

SEQ ID NO: 1418 - protein, 119 aa, synthetic construct
  REGION 1..119: note = Description of Artificial Sequence: Synthetic polypeptide
EVQLVESGGGLVQPGGSLTLSCVASGSTSSINAMAWYRRAPGKQRELVAGISSDGSKVYADSVKGRFTISRDNAKNSVYLQMNSLRAEDTAVYYCYYFRTVSGSHMRYWGQGTLVTVSS

SEQ ID NO: 1419 - protein, 119 aa, synthetic construct
  REGION 1..119: note = Description of Artificial Sequence: Synthetic polypeptide
EVQLVESGGGLVQPGGSLTLSCVASGSTSIINAMGWYRRAPGKQRELVAGISSDGSKVYEDSVKGRFTISRDNAKNSVYLQMNSLRAEDTAVYYCYYFRAVSGSSMRYWGQGTLVTVSS

SEQ ID NO: 1420 - protein, 119 aa, synthetic construct
  REGION 1..119: note = Description of Artificial Sequence: Synthetic polypeptide
EVQLVESGGGLVQPGGSLTLSCVASGSTSSINAMAWYRRAPGKQRELVAGISSDGSKVYADSVKGRFTISRDNAKNSVYLQMNSLRAEDTAVYYCYYFRTVSGSSMRYWGQGTLVTVSS

SEQ ID NO: 1421 - protein, 119 aa, synthetic construct
  REGION 1..119: note = Description of Artificial Sequence: Synthetic polypeptide
EVQLVESGGGLVQPGGSLTLSCVASGSTSRINAMGWYRRAPGKQRELPAGISSDGSKVYAVSVKGRFTISRDNAKNSVYLQMNSLRAEDTAVYYCYYFRTVSGSPMRYWGQGTLVTVSS

SEQ ID NO: 1422 - protein, 119 aa, synthetic construct
  REGION 1..119: note = Description of Artificial Sequence: Synthetic polypeptide
EVQLVESGGGLVQPGGSLTLSCVASGSTSRINAMGWYRRAPGKQRELVAGVSSDGSKVYADSVKGRFTISRDNAKNSVYLQMNSLRAEDTAVYYCYYFRTVSGSSMSYWGQGTLVTVSS

SEQ ID NO: 1423 - protein, 119 aa, synthetic construct
  REGION 1..119: note = Description of Artificial Sequence: Synthetic polypeptide
EVQLVESGGGLVQPGGSLTLSCVASGTTSSINAMGWYRRAPGKQRELVAGISSDGSKVYEDSVKGRFTISRDNAKNSVYLQMNSLRAEDTAVYYCYYFRTVSGSSMRYWGQGTLVTVSS

SEQ ID NO: 1424 - protein, 119 aa, synthetic construct
  REGION 1..119: note = Description of Artificial Sequence: Synthetic polypeptide
EVQLVESGGGLVQPGGSLTLSCVASGITSSINAMGWYRRAPGKQRELVAGISSDGSKVYAGSVKGRFTISRDNAKNSVYLQMNSLRAEDTAVYYCYYFRTVRGSSMRYWGQGTLVTVSS

SEQ ID NO: 1425 - protein, 119 aa, synthetic construct
  REGION 1..119: note = Description of Artificial Sequence: Synthetic polypeptide
EVQLVESGGGLVQPGGSLTLSCVASGSTSDINAMGWYRRAPGKQRELVAGISSDKSKVYADSVKGRFTISRDNAKNSVYLQMNSLRAEDTAVYYCYYFRTVRGSSMRYWGQGTLVTVSS

SEQ ID NO: 1426 - protein, 119 aa, synthetic construct
  REGION 1..119: note = Description of Artificial Sequence: Synthetic polypeptide
EVQLVESGGGLVQPGGSLTLSCVASGSTSSINAMAWYRRAPGKQRELVAGISSNGSKVYADSVKGRFTISRDNAKNSVYLQMNSLRAEDTAVYYCYYFRQVSGSSMRYWGQGTLVTVSS

SEQ ID NO: 1427 - protein, 119 aa, synthetic construct
  REGION 1..119: note = Description of Artificial Sequence: Synthetic polypeptide
EVQLVESGGGLVQPGGSLTLSCVASGSTSSINAIGWYRRAPGKQRELVAGISSDGSKVLADSVKGRFTISRDNAKNSVYLQMNSLRAEDTAVYYCYYFRIVSGSSMGYWGQGTLVTVSS

SEQ ID NO: 1428 - protein, 119 aa, synthetic construct
  REGION 1..119: note = Description of Artificial Sequence: Synthetic polypeptide
EVQLVESGGGLVQPGGSLTLSCVASGSTSSKNAMGWYRRAPGKQRELVAGISSDGSKVYADSVKGRFTISRDNAKNSVYLQMNSLRAEDTAVYYCYYFRTVSGASMRYWGQGTLVTVSS

SEQ ID NO: 1429 - protein, 119 aa, synthetic construct
  REGION 1..119: note = Description of Artificial Sequence: Synthetic polypeptide
EVQLVESGGGLVQPGGSLTLSCVASGSTSSINAMGWYRRAPGKQRELVAGISSDNSKVYADSVKGRFTISRDNAKNSVYLQMNSLRAEDTAVYYCYYFRTVHGSSMRYWGQGTLVTVSS

SEQ ID NO: 1430 - protein, 119 aa, synthetic construct
  REGION 1..119: note = Description of Artificial Sequence: Synthetic polypeptide
EVQLVESGGGLVQPGGSLTLSCVASGLTSSINAMGWYRRAPGKQRELVAGISSDGSKVYADSVKGRFTISRDNAKNSVYLQMNSLRAEDTAVYYCYYFRMVSGSSMRYWGQGTLVTVSS

SEQ ID NO: 1431 - protein, 119 aa, synthetic construct
  REGION 1..119: note = Description of Artificial Sequence: Synthetic polypeptide
EVQLVESGGGLVQPGGSLTLSCVASGSTSSINAMAWYRRAPGKQRELVAGISSDGSKVYTDSVKGRFTISRDNAKNSVYLQMNSLRAEDTAVYYCYYFRTISGSSMRYWGQGTLVTVSS

SEQ ID NO: 1432 - protein, 119 aa, synthetic construct
  REGION 1..119: note = Description of Artificial Sequence: Synthetic polypeptide
EVQLVESGGGLVQPGGSLTLSCVASGSTSSNNAMAWYRRAPGKQRELVAGISSDGSKVYTDSVKGRFTISRDNAKNSVYLQMNSLRAEDTAVYYCYYFRTRSGSSMRYWGQGTLVTVSS

SEQ ID NO: 1433 - protein, 119 aa, synthetic construct
  REGION 1..119: note = Description of Artificial Sequence: Synthetic polypeptide
EVQLVESGGGLVQPGGSLTLSCVASGSTSSINAMAWYRRAPGKQRELVAGISSDNSKVYADSVKGRFTISRDNAKNSVYLQMNSLRAEDTAVYYCYYFRTVSGHSMRYWGQGTLVTVSS

SEQ ID NO: 1434 - protein, 119 aa, synthetic construct
  REGION 1..119: note = Description of Artificial Sequence: Synthetic polypeptide
EVQLVESGGGLVQPGGSLTLSCVASGSTSHINAMGWYRRAPGKQRELVAGISSDGSRVYADSVKGRFTISRDNAKNSVYLQMNSLRAEDTAVYYCYYFRTVSGGSMRYWGQGTLVTVSS

SEQ ID NO: 1435 - protein, 119 aa, synthetic construct
  REGION 1..119: note = Description of Artificial Sequence: Synthetic polypeptide
EVQLVESGGGLVQPGGSLTLSCVASGQTSSINAMGWYRRAPGKQRELVAGISSDGSQVYADSVKGRFTISRDNAKNSVYLQMNSLRAEDTAVYYCYYFRTKSGSSMRYWGQGTLVTVSS

SEQ ID NO: 1436 - protein, 119 aa, synthetic construct
  REGION 1..119: note = Description of Artificial Sequence: Synthetic polypeptide
EVQLVESGGGLVQPGGSLTLSCVASGSTSRINGMGWYRRAPGKQRELPAGISSDGSKAYADSVKGRFTISRDNAKNSVYLQMNSLRAEDTAVYYCYYFRTASGTSMRYWGQGTLVTVSS

SEQ ID NO: 1437 - protein, 119 aa, synthetic construct
  REGION 1..119: note = Description of Artificial Sequence: Synthetic polypeptide
EVQLVESGGGLVQPGGSLTLSCVASGSTSVINAMAWYRRAPGKQRELAAGISSDGSKVYAKSAKGRFTISRDNAKNSVYLQMNSLRAEDTAVYYCYYFNTVSGSSMRYWGQGTLVTVSS

SEQ ID NO: 1438 - protein, 119 aa, synthetic construct
  REGION 1..119: note = Description of Artificial Sequence: Synthetic polypeptide
EVQLVESGGGLVQPGGSLTLSCVASGSTSSINAMAWYRRAPGKQRELVAGISSDGSKVYNDSVKGRFTISRDNAKNSVYLQMNSLRAEDTAVYYCYYFRTVRGSSQRYWGQGTLVTVSS

SEQ ID NO: 1439 - protein, 119 aa, synthetic construct
  REGION 1..119: note = Description of Artificial Sequence: Synthetic polypeptide
EVQLVESGGGLVQPGGSLTLSCVASGKTSSINAMGWYRRAPGKQRELVAGISSDGSKVIADSVKGRFTISRDNAKNSVYLQMNSLRAEDTAVYYCYYFRTVLGSSMRYWGQGTLVTVSS

SEQ ID NO: 1440 - protein, 119 aa, synthetic construct
  REGION 1..119: note = Description of Artificial Sequence: Synthetic polypeptide
EVQLVESGGGLVQPGGSLTLSCVASGSTSSINAMAWYRRAPGKQRELVAGISSDGSKVYTDSVKGRFTISRDNAKNSVYLQMNSLRAEDTAVYYCYYFRTRSGSSMRYWGQGTLVTVSS

SEQ ID NO: 1441 - protein, 119 aa, synthetic construct
  REGION 1..119: note = Description of Artificial Sequence: Synthetic polypeptide
EVQLVESGGGLVQPGGSLTLSCVASGSVSSINAMGWYRRAPGKQRELVAGISSDGSKVYIDSVKGRFTISRDNAKNSVYLQMNSLRAEDTAVYYCYYFRTVSGLSMRYWGQGTLVTVSS

SEQ ID NO: 1442 - protein, 119 aa, synthetic construct
  REGION 1..119: note = Description of Artificial Sequence: Synthetic polypeptide
EVQLVESGGGLVQPGGSLTLSCVASGNTSSINAMGWYRRAPGKQRELVAGISSDGSKVYYDSVKGRFTISRDNAKNSVYLQMNSLRAEDTAVYYCYYFRTVRGSSQRYWGQGTLVTVSS

SEQ ID NO: 1443 - protein, 119 aa, synthetic construct
  REGION 1..119: note = Description of Artificial Sequence: Synthetic polypeptide
EVQLVESGGGLVQPGGSLTLSCVASGSTSSTNAMGWYRRAPGKQRELVAGISSDGSKVYVDSVKGRFTISRDNAKNSVYLQMNSLRAEDTAVYYCYYFRTVSGSSMVYWGQGTLVTVSS

SEQ ID NO: 1444 - protein, 119 aa, synthetic construct
  REGION 1..119: note = Description of Artificial Sequence: Synthetic polypeptide
EVQLVESGGGLVQPGGSLTLSCVASGSTSSINAMGWYRRAPGKQRELVAGISSDGSKVYGDSVKGRFTISRDNAKNSVYLQMNSLRAEDTAVYYCYYFRTVSRSSMRYWGQGTLVTVSS

SEQ ID NO: 1445 - protein, 119 aa, synthetic construct
  REGION 1..119: note = Description of Artificial Sequence: Synthetic polypeptide
EVQLVESGGGLVQPGGSLTLSCVASGSTSSINAMAWYRRAPGKQRELAAGISSDQSKVYADSAKGRFTISRDNAKNSVYLQMNSLRAEDTAVYYCYYFRTVSGSSMSYWGQGTLVTVSS

SEQ ID NO: 1446 - protein, 119 aa, synthetic construct
  REGION 1..119: note = Description of Artificial Sequence: Synthetic polypeptide
EVQLVESGGGLVQPGGSLTLSCVASGGTSSINAMGWYRRAPGKQRELVAGISSDGSKVYSDSVKGRFTISRDNAKNSVYLQMNSLRAEDTAVYYCYYFRTVSGSSARYWGQGTLVTVSS

SEQ ID NO: 1447 - protein, 119 aa, synthetic construct
  REGION 1..119: note = Description of Artificial Sequence: Synthetic polypeptide
EVQLVESGGGLVQPGGSLTLSCVASGSTRSINAMGWYRRAPGKQRELVAGISSDGSKVYADSVKGRFTISRDNAKNSVYLQMNSLRAEDTAVYYCYYFHTVSGSSMRYWGQGTLVTVSS

SEQ ID NO: 1448 - protein, 119 aa, synthetic construct
  REGION 1..119: note = Description of Artificial Sequence: Synthetic polypeptide
EVQLVESGGGLVQPGGSLTLSCVASGTTSSINAMGWYRRAPGKQRELVAGISSDGSKVIADSVKGRFTISRDNAKNSVYLQMNSLRAEDTAVYYCYYFRTVLGSSMRYWGQGTLVTVSS

SEQ ID NO: 1449 - protein, 119 aa, synthetic construct
  REGION 1..119: note = Description of Artificial Sequence: Synthetic polypeptide
EVQLVESGGGLVQPGGSLTLSCVASGSTSSINAMGWYRRAPGKQRELVAGISSDGSKVDADSVKGRFTISRDNAKNSVYLQMNSLRAEDTAVYYCYYFRTVSGSSMRYWGQGTLVTVSS

SEQ ID NO: 1450 - protein, 119 aa, synthetic construct
  REGION 1..119: note = Description of Artificial Sequence: Synthetic polypeptide
EVQLVESGGGLVQPGGSLTLSCVASGSTSSINAMAWYRRAPGKQRELVAGISSDGSKVYKDSVKGRFTISRDNAKNSVYLQMNSLRAEDTAVYYCYYFRNVSGSSMRYWGQGTLVTVSS

SEQ ID NO: 1451 - protein, 119 aa, synthetic construct
  REGION 1..119: note = Description of Artificial Sequence: Synthetic polypeptide
EVQLVESGGGLVQPGGSLTLSCVASGNTSSINAMGWYRRAPGKQRELVAGISSNGSKVYADSVKGRFTISRDNAKNSVYLQMNSLRAEDTAVYYCYYFRTVTGSSMRYWGQGTLVTVSS

SEQ ID NO: 1452 - protein, 119 aa, synthetic construct
  REGION 1..119: note = Description of Artificial Sequence: Synthetic polypeptide
EVQLVESGGGLVQPGGSLTLSCVASGSTSRINAMGWYRRAPGKQRELVAGISSDGSKVYKDSVKGRFTISRDNAKNSVYLQMNSLRAEDTAVYYCYYFRTVSGSSMRYWGQGTLVTVSS

SEQ ID NO: 1453 - protein, 119 aa, synthetic construct
  REGION 1..119: note = Description of Artificial Sequence: Synthetic polypeptide
EVQLVESGGGLVQPGGSLTLSCVASGSTSSINAIGWYRRAPGKQRELVAGISSDGSKVYADSVKGRFTISRDNAKNSVYLQMNSLRAEDTAVYYCYYFRTVKGSSMRYWGQGTLVTVSS

SEQ ID NO: 1454 - protein, 119 aa, synthetic construct
  REGION 1..119: note = Description of Artificial Sequence: Synthetic polypeptide
EVQLVESGGGLVQPGGSLTLSCVASGLTSSINAMGWYRRAPGKQRELVAGISSDGSKVYQDSVKGRFTISRDNAKNSVYLQMNSLRAEDTAVYYCYYFRTNSGSSMRYWGQGTLVTVSS

SEQ ID NO: 1455 - protein, 119 aa, synthetic construct
  REGION 1..119: note = Description of Artificial Sequence: Synthetic polypeptide
EVQLVESGGGLVQPGGSLTLSCVASGSTSSINAMAWYRRAPGKQRELVAGISSDGSKVYAESVKGRFTISRDNAKNSVYLQMNSLRAEDTAVYYCYYFRTVSGASMRYWGQGTLVTVSS

SEQ ID NO: 1456 - protein, 119 aa, synthetic construct
  REGION 1..119: note = Description of Artificial Sequence: Synthetic polypeptide
EVQLVESGGGLVQPGGSLTLSCVASGSTSSTNAMGWYRRAPGKQRELVAGISSDGSKVLADSVKGRFTISRDNAKNSVYLQMNSLRAEDTAVYYCYYFRTVNLSSMRYWGQGTLVTVSS

SEQ ID NO: 1457 - protein, 119 aa, synthetic construct
  REGION 1..119: note = Description of Artificial Sequence: Synthetic polypeptide
EVQLVESGGGLVQPGGSLTLSCVASGSTSSINAIGWYRRAPGKQRELVAGISSDGSKYYADSVKGRFTISRDNAKNSVYLQMNSLRAEDTAVYYCYYFRTVTGSSMRYWGQGTLVTVSS

SEQ ID NO: 1458 - protein, 119 aa, synthetic construct
  REGION 1..119: note = Description of Artificial Sequence: Synthetic polypeptide
EVQLVESGGGLVQPGGSLTLSCVASGSTSSINAIGWYRRAPGKQRELVAGISSDGSKVYAVSVKGRFTISRDNAKNSVYLQMNSLRAEDTAVYYCYYFRKVSGSSARYWGQGTLVTVSS

SEQ ID NO: 1459 - protein, 119 aa, synthetic construct
  REGION 1..119: note = Description of Artificial Sequence: Synthetic polypeptide
EVQLVESGGGLVQPGGSLTLSCVASGSTSSINAMGWYRRAPGKQRELVAGISSDGSKVVADSVKGRFTISRDNAKNSVYLQMNSLRAEDTAVYYCYYFRTYSGSSMRYWGQGTLVTVSS

SEQ ID NO: 1460 - protein, 119 aa, synthetic construct
  REGION 1..119: note = Description of Artificial Sequence: Synthetic polypeptide
EVQLVESGGGLVQPGGSLTLSCVASGSTSSINAMGWYRRAPGKQRELVAGISSDGSKVYADSVKGRFTISRDNAKNSVYLQMNSLRAEDTAVYYCYYFRTVSKSSMRYWGQGTLVTVSS

SEQ ID NO: 1461 - protein, 119 aa, synthetic construct
  REGION 1..119: note = Description of Artificial Sequence: Synthetic polypeptide
EVQLVESGGGLVQPGGSLTLSCVASGSTSSINAMAWYRRAPGKQRELVAGISSDGSKVYADSVKGRFTISRDNAKNSVYLQMNSLRAEDTAVYYCYYFKTVSGSSMRYWGQGTLVTVSS

SEQ ID NO: 1462 - protein, 119 aa, synthetic construct
  REGION 1..119: note = Description of Artificial Sequence: Synthetic polypeptide
EVQLVESGGGLVQPGGSLTLSCVASGSTSSINAMAWYRRAPGKQRELAAGISSDNSKVYADSVKGRFTISRDNAKNSVYLQMNSLRAEDTAVYYCYYFRTRSGSSMRYWGQGTLVTVSS

SEQ ID NO: 1463 - protein, 119 aa, synthetic construct
  REGION 1..119: note = Description of Artificial Sequence: Synthetic polypeptide
EVQLVESGGGLVQPGGSLTLSCVASGSKSSINAMGWYRRAPGKQRELAAGISSDGSKVYAQSVKGRFTISRDNAKNSVYLQMNSLRAEDTAVYYCYYFRTSSGSSMRYWGQGTLVTVSS

SEQ ID NO: 1464 - protein, 119 aa, synthetic construct
  REGION 1..119: note = Description of Artificial Sequence: Synthetic polypeptide
EVQLVESGGGLVQPGGSLTLSCVASGTTSSINAMGWYRRAPGKQRELVAGISSDGSKVYVDSVKGRFTISRDNAKNSVYLQMNSLRAEDTAVYYCYYFRFLSGSSMRYWGQGTLVTVSS

SEQ ID NO: 1465 - protein, 119 aa, synthetic construct
  REGION 1..119: note = Description of Artificial Sequence: Synthetic polypeptide
EVQLVESGGGLVQPGGSLTLSCVASGSTSSINAFGWYRRAPGKQRELVAGISSDGSKVYSDSVKGRFTISRDNAKNSVYLQMNSLRAEDTAVYYCYYFRTVSGSSMRYWGQGTLVTVSS

SEQ ID NO: 1466 - protein, 119 aa, synthetic construct
  REGION 1..119: note = Description of Artificial Sequence: Synthetic polypeptide
EVQLVESGGGLVQPGGSLTLSCVASGSTFSINAMGWYRRAPGKQRELVAGISSDGSKVLADSVKGRFTISRDNAKNSVYLQMNSLRAEDTAVYYCYYFRLVSGSSMRYWGQGTLVTVSS

SEQ ID NO: 1467 - protein, 119 aa, synthetic construct
  REGION 1..119: note = Description of Artificial Sequence: Synthetic polypeptide
EVQLVESGGGLVQPGGSLTLSCVASGSTRSINAMGWYRRAPGKQRELVAGISSDGSKVYNDSVKGRFTISRDNAKNSVYLQMNSLRAEDTAVYYCYYFRTVSGSSMRFWGQGTLVTVSS

SEQ ID NO: 1468 - protein, 119 aa, synthetic construct
  REGION 1..119: note = Description of Artificial Sequence: Synthetic polypeptide
EVQLVESGGGLVQPGGSLTLSCVASGSTSSINAIGWYRRAPGKQRELVAGISSDGSKVYNDSVKGRFTISRDNAKNSVYLQMNSLRAEDTAVYYCYYFRTQSGSSMRYWGQGTLVTVSS

SEQ ID NO: 1469 - protein, 119 aa, synthetic construct
  REGION 1..119: note = Description of Artificial Sequence: Synthetic polypeptide
EVQLVESGGGLVQPGGSLTLSCVASGSTSSINAMGWYRRAPGKQRELVAGISSDGSKVYVDSVKGRFTISRDNAKNSVYLQMNSLRAEDTAVYYCYYFRTVSGSSMPYWGQGTLVTVSS

SEQ ID NO: 1470 - protein, 119 aa, synthetic construct
  REGION 1..119: note = Description of Artificial Sequence: Synthetic polypeptide
EVQLVESGGGLVQPGGSLTLSCVASGSTSSINAMGWYRRAPGKQRELVAGISSDGSKVVADSVKGRFTISRDNAKNSVYLQMNSLRAEDTAVYYCYYFRTLSGSSMRYWGQGTLVTVSS

SEQ ID NO: 1471 - protein, 119 aa, synthetic construct
  REGION 1..119: note = Description of Artificial Sequence: Synthetic polypeptide
EVQLVESGGGLVQPGGSLTLSCVASGTTSSINAMGWYRRAPGKQRELVAGISSDGSKVYGDSVKGRFTISRDNAKNSVYLQMNSLRAEDTAVYYCYYFRTVSGSAMRYWGQGTLVTVSS

SEQ ID NO: 1472 - protein, 119 aa, synthetic construct
  REGION 1..119: note = Description of Artificial Sequence: Synthetic polypeptide
EVQLVESGGGLVQPGGSLTLSCVASGSTSSINAMAWYRRAPGKQRELVAGISSDGSKVYTDSVKGRFTISRDNAKNSVYLQMNSLRAEDTAVYYCYYFRTTSGSSMRYWGQGTLVTVSS

SEQ ID NO: 1473 - protein, 119 aa, synthetic construct
  REGION 1..119: note = Description of Artificial Sequence: Synthetic polypeptide
EVQLVESGGGLVQPGGSLTLSCVASGRTSSINAMGWYRRAPGKQRELVAGISSDGSKVYNDSVKGRFTISRDNAKNSVYLQMNSLRAEDTAVYYCYYFRTVSGTSMRYWGQGTLVTVSS

SEQ ID NO: 1474 - protein, 119 aa, synthetic construct
  REGION 1..119: note = Description of Artificial Sequence: Synthetic polypeptide
EVQLVESGGGLVQPGGSLTLSCVASGSTSSRNAMGWYRRAPGKQRELVAGISSDGSKVTADSVKGRFTISRDNAKNSVYLQMNSLRAEDTAVYYCYYFRTRSGSSMRYWGQGTLVTVSS

SEQ ID NO: 1475 - protein, 119 aa, synthetic construct
  REGION 1..119: note = Description of Artificial Sequence: Synthetic polypeptide
EVQLVESGGGLVQPGGSLTLSCVASGSTKSINAMGWYRRAPGKQRELVAGISSDGSKVYRDSVKGRFTISRDNAKNSVYLQMNSLRAEDTAVYYCYYFRTSSGSSMRYWGQGTLVTVSS

SEQ ID NO: 1476 - protein, 119 aa, synthetic construct
  REGION 1..119: note = Description of Artificial Sequence: Synthetic polypeptide
EVQLVESGGGLVQPGGSLTLSCVASGSTSSRNAMGWYRRAPGKQRELVAGISSNGSKVYSDSVKGRFTISRDNAKNSVYLQMNSLRAEDTAVYYCYYFRTVSGSSMSYWGQGTLVTVSS

SEQ ID NO: 1477 - protein, 119 aa, synthetic construct
  REGION 1..119: note = Description of Artificial Sequence: Synthetic polypeptide
EVQLVESGGGLVQPGGSLTLSCVASGSTSSINAIGWYRRAPGKQRELVAGISSDGSKVYSDSVKGRFTISRDNAKNSVYLQMNSLRAEDTAVYYCYYFRPVSGSSMRYWGQGTLVTVSS

SEQ ID NO: 1478 - protein, 119 aa, synthetic construct
  REGION 1..119: note = Description of Artificial Sequence: Synthetic polypeptide
EVQLVESGGGLVQPGGSLTLSCVASGSTSLINAMGWYRRAPGKQRELVAGISSDGSKVYADSVKGRFTISRDNAKNSVYLQMNSLRAEDTAVYYCYYFRHVSGSSMRYWGQGTLVTVSS

SEQ ID NO: 1479 - protein, 119 aa, synthetic construct
  REGION 1..119: note = Description of Artificial Sequence: Synthetic polypeptide
EVQLVESGGGLVQPGGSLTLSCVASGSTSSINAMAWYRRAPGKQRELVAGISSDGSKVYADSVKGRFTISRDNAKNSVYLQMNSLRAEDTAVYYCYYFRTKSGSSMRYWGQGTLVTVSS

SEQ ID NO: 1480 - protein, 119 aa, synthetic construct
  REGION 1..119: note = Description of Artificial Sequence: Synthetic polypeptide
EVQLVESGGGLVQPGGSLTLSCVASGSTSSINAMGWYRRAPGKQRELVAGISSDGSLVYADSVKGRFTISRDNAKNSVYLQMNSLRAEDTAVYYCYYFTTVSGSSMRYWGQGTLVTVSS

SEQ ID NO: 1481 - protein, 119 aa, synthetic construct
  REGION 1..119: note = Description of Artificial Sequence: Synthetic polypeptide
EVQLVESGGGLVQPGGSLTLSCVASGTTSSINAMGWYRRAPGKQRELVAGISSDGTKVYADSVKGRFTISRDNAKNSVYLQMNSLRAEDTAVYYCYYFHTVSGSSMRYWGQGTLVTVSS

SEQ ID NO: 1482 - protein, 119 aa, synthetic construct
  REGION 1..119: note = Description of Artificial Sequence: Synthetic polypeptide
EVQLVESGGGLVQPGGSLTLSCVASGSTSSINAFGWYRRAPGKQRELVAGISSDGSKVYADSVKGRFTISRDNAKNSVYLQMNSLRAEDTAVYYCYYFRTVRGSSMRYWGQGTLVTVSS

SEQ ID NO: 1483 - protein, 119 aa, synthetic construct
  REGION 1..119: note = Description of Artificial Sequence: Synthetic polypeptide
EVQLVESGGGLVQPGGSLTLSCVASGSTSSRNAMGWYRRAPGKQRELVAGISSDGSKLYLDSVKGRFTISRDNAKNSVYLQMNSLRAEDTAVYYCYYFRTVLGSSMRYWGQGTLVTVSS

SEQ ID NO: 1484 - protein, 119 aa, synthetic construct
  REGION 1..119: note = Description of Artificial Sequence: Synthetic polypeptide
EVQLVESGGGLVQPGGSLTLSCVASGNTSSINAMGWYRRAPGKQRELVAGISSDGSRVYADSVKGRFTISRDNAKNSVYLQMNSLRAEDTAVYYCYYFRTVSGSSMRSWGQGTLVTVSS

SEQ ID NO: 1485 - protein, 119 aa, synthetic construct
  REGION 1..119: note = Description of Artificial Sequence: Synthetic polypeptide
EVQLVESGGGLVQPGGSLTLSCVASGTTSSINAMGWYRRAPGKQRELVAGISSDGSKVYNDSVKGRFTISRDNAKNSVYLQMNSLRAEDTAVYYCYYFRTVRGSSMRYWGQGTLVTVSS

SEQ ID NO: 1486 - protein, 119 aa, synthetic construct
  REGION 1..119: note = Description of Artificial Sequence: Synthetic polypeptide
EVQLVESGGGLVQPGGSLTLSCVASGSTASINAMGWYRRAPGKQRELVAGISSDGSKVYADSVKGRFTISRDNAKNSVYLQMNSLRAEDTAVYYCYYFRYVSGSSMRYWGQGTLVTVSS

SEQ ID NO: 1487 - protein, 119 aa, synthetic construct
  REGION 1..119: note = Description of Artificial Sequence: Synthetic polypeptide
EVQLVESGGGLVQPGGSLTLSCVASGSTSSINAVGWYRRAPGKQRELVAGISSDGSKVYVDSVKGRFTISRDNAKNSVYLQMNSLRAEDTAVYYCYYFRTVYGSSMRYWGQGTLVTVSS

SEQ ID NO: 1488 - protein, 119 aa, synthetic construct
  REGION 1..119: note = Description of Artificial Sequence: Synthetic polypeptide
EVQLVESGGGLVQPGGSLTLSCVASGSTSSRNAMGWYRRAPGKQRELVAGISSDGSKLYADSVKGRFTISRDNAKNSVYLQMNSLRAEDTAVYYCYYFRTVLGSSMRYWGQGTLVTVSS

SEQ ID NO: 1489 - protein, 119 aa, synthetic construct
  REGION 1..119: note = Description of Artificial Sequence: Synthetic polypeptide
EVQLVESGGGLVQPGGSLTLSCVASGSTNSINAMGWYRRAPGKQRELVAGISSDGSKVYKDSVKGRFTISRDNAKNSVYLQMNSLRAEDTAVYYCYYYRTVSGSSMRYWGQGTLVTVSS

SEQ ID NO: 1490 - protein, 119 aa, synthetic construct
  REGION 1..119: note = Description of Artificial Sequence: Synthetic polypeptide
EVQLVESGGGLVQPGGSLTLSCVASGSTSSINAMAWYRRAPGKQRELVAGISSDGSKVYADSVKGRFTISRDNAKNSVYLQMNSLRAEDTAVYYCYYFRSVSGSSMRYWGQGTLVTVSS

SEQ ID NO: 1491 - protein, 119 aa, synthetic construct
  REGION 1..119: note = Description of Artificial Sequence: Synthetic polypeptide
EVQLVESGGGLVQPGGSLTLSCVASGSTSRINAMGWYRRAPGKQRELVAGISSDGSKVYQDSVKGRFTISRDNAKNSVYLQMNSLRAEDTAVYYCYYFRRVSGSSMRYWGQGTLVTVSS

SEQ ID NO: 1492 - protein, 119 aa, synthetic construct
  REGION 1..119: note = Description of Artificial Sequence: Synthetic polypeptide
EVQLVESGGGLVQPGGSLTLSCVPSGSTSNINAMGWYRRAPGKQRELPAGISSDGTKIYADSAKVPFTITRDNAKNSVYLQMNSLRAEDTAVYYCYYFRTVSGTSMRYWGQGTLVTVSS

SEQ ID NO: 1493 - protein, 119 aa, synthetic construct
  REGION 1..119: note = Description of Artificial Sequence: Synthetic polypeptide
EVQLVESGGGLVQPGGSLTLSCVASGSTSKINAMGWYRRAPGKQRELVAGISSDRSKVYADSVKGRFTISRDNAKNSVYLQMNSLRAEDTAVYYCYYFRTVAGSSMRYWGQGTLVTVSS

SEQ ID NO: 1494 - protein, 119 aa, synthetic construct
  REGION 1..119: note = Description of Artificial Sequence: Synthetic polypeptide
EVQLVESGGGLVQPGGSLTLSCVASGSTSSINALGWYRRAPGKQRELVAGISSDGSLVYADSVKGRFTISRDNAKNSVYLQMNSLRAEDTAVYYCYYFRIVSGSSMRYWGQGTLVTVSS

SEQ ID NO: 1495 - protein, 119 aa, synthetic construct
  REGION 1..119: note = Description of Artificial Sequence: Synthetic polypeptide
EVQLVESGGGLVQPGGSLTLSCVASGKTSSINAMGWYRRAPGKQRELVAGISSDGSKVYADSVKGRFTISRDNAKNSVYLQMNSLRAEDTAVYYCYYFRTVSGVSMRYWGQGTLVTVSS

SEQ ID NO: 1496 - protein, 119 aa, synthetic construct
  REGION 1..119: note = Description of Artificial Sequence: Synthetic polypeptide
EVQLVESGGGLVQPGGSLTLSCVASGSTSSINAVGWYRRAPGKQRELVAGISSDGSKVYRDSVKGRFTISRDNAKNSVYLQMNSLRAEDTAVYYCYYFRTVQGSSMRYWGQGTLVTVSS

SEQ ID NO: 1497 - protein, 119 aa, synthetic construct
  REGION 1..119: note = Description of Artificial Sequence: Synthetic polypeptide
EVQLVESGGGLVQPGGSLTLSCVASGSTSRINAMGWYRRAPGKQRELVAGISSDGSKVYADSVKGRFTISRDNAKNSVYLQMNSLRAEDTAVYYCYYFRTASGSSMRYWGQGTLVTVSS

SEQ ID NO: 1498 - protein, 119 aa, synthetic construct
  REGION 1..119: note = Description of Artificial Sequence: Synthetic polypeptide
EVQLVESGGGLVQPGGSLTLSCVASGSTSSINAMGWYRRAPGKQRELVAGISSDGSKVYSDSVKGRFTISRDNAKNSVYLQMNSLRAEDTAVYYCYYFRTVSGSSSRYWGQGTLVTVSS

SEQ ID NO: 1499 - protein, 119 aa, synthetic construct
  REGION 1..119: note = Description of Artificial Sequence: Synthetic polypeptide
EVQLVESGGGLVQPGGSLTLSCVASGSTSSINAVGWYRRAPGKQRELVAGISSDGTKVYRDSVKGRFTISRDNAKNSVYLQMNSLRAEDTAVYYCYYFRTVQGSSMRYWGQGTLVTVSS

SEQ ID NO: 1500 - protein, 119 aa, synthetic construct
  REGION 1..119: note = Description of Artificial Sequence: Synthetic polypeptide
EVQLVESGGGLVQPGGSLTLSCVASGTTSSINAMGWYRRAPGKQRELAAGISSDGSKVYNDSVKGRFTISRDNAKNSVYLQMNSLRAEDTAVYYCYYFRTVRGSSMRYWGQGTLVTVSS

SEQ ID NO: 1501 - protein, 119 aa, synthetic construct
  REGION 1..119: note = Description of Artificial Sequence: Synthetic polypeptide
EVQLVESGGGLVQPGGSLTLSCVASGSTSSINAMGWYRRAPGKQRELVAGISSDGSKVYADSVKGRFTISRDNAKNSVYLQMNSLRAEDTAVYYCYYFRTKSGSSMRYWGQGTLVTVSS

SEQ ID NO: 1502 - protein, 119 aa, synthetic construct
  REGION 1..119: note = Description of Artificial Sequence: Synthetic polypeptide
EVQLVESGGGLVQPGGSLTLSCVASGTTSSINAMGWYRRAPGKQRELVAGISSDGSKVYADSVKGRFTISRDNAKNSVYLQMNSLRAEDTAVYYCYYFRTVWGSSMRYWGQGTLVTVSS

SEQ ID NO: 1503 - protein, 119 aa, synthetic construct
  REGION 1..119: note = Description of Artificial Sequence: Synthetic polypeptide
EVQLVESGGGLVQPGGSLTLSCVASGKTSSINAMGWYRRAPGKQRELVAGISSDGSKVYTDSVKGRFTISRDNAKNSVYLQMNSLRAEDTAVYYCYYFRTRSGSSMRYWGQGTLVTVSS

SEQ ID NO: 1504 - protein, 119 aa, synthetic construct
  REGION 1..119: note = Description of Artificial Sequence: Synthetic polypeptide
EVQLVESGGGLVQPGGSLTLSCVASGSTSSINAMGWYRRAPFKQGELPAGISPDGTKAYADSAKVRFTISRDNAKNSVYLQMNSLRAEDTAVYYCYYFHTVCGTSMGYWGQGTLVTVSS

SEQ ID NO: 1505 - protein, 119 aa, synthetic construct
  REGION 1..119: note = Description of Artificial Sequence: Synthetic polypeptide
EVQLVESGGGLVQPGGSLTLSCVASGSTSAINAMGWYRRAPGKQRELVAGISSDGSKVYVDSVKGRFTISRDNAKNSVYLQMNSLRAEDTAVYYCYYFRTVSGSSQRYWGQGTLVTVSS

SEQ ID NO: 1506 - protein, 119 aa, synthetic construct
  REGION 1..119: note = Description of Artificial Sequence: Synthetic polypeptide
EVQLVESGGGLVQPGGSLTLSCVASGSPSSINAYGWYRRAPGKQRELVAGISSDGSKVYSDSVKGRFTISRDNAKNSVYLQMNSLRAEDTAVYYCYYFRTVSGSSMSYWGQGTLVTVSS

SEQ ID NO: 1507 - protein, 119 aa, synthetic construct
  REGION 1..119: note = Description of Artificial Sequence: Synthetic polypeptide
EVQLVESGGGLVQPGGSLTLSCVASGSTSSINAMGWYRRAPGKQRELVAGISSDGSKVYASSVKGRFTISRDNAKNSVYLQMNSLRAEDTAVYYCYYFRTVRGSSMRYWGQGTLVTVSS

SEQ ID NO: 1508 - protein, 119 aa, synthetic construct
  REGION 1..119: note = Description of Artificial Sequence: Synthetic polypeptide
EVQLVESGGGLVQPGGSLTLSCVASGSRSSINAMGWYRRAPGKQRELVAGISADGSKVYADSVKGRFTISRDNAKNSVYLQMNSLRAEDTAVYYCYYFRTQSGSSMRYWGQGTLVTVSS

SEQ ID NO: 1509 - protein, 119 aa, synthetic construct
  REGION 1..119: note = Description of Artificial Sequence: Synthetic polypeptide
EVQLVESGGGLVQPGGSLTLSCVASGSVSSINAMGWYRRAPGKQRELVAGISSDGSKVYASSAKGRFTISRDNAKNSVYLQMNSLRAEDTAVYYCYYFRTLSGSSMRYWGQGTLVTVSS

SEQ ID NO: 1510 - protein, 119 aa, synthetic construct
  REGION 1..119: note = Description of Artificial Sequence: Synthetic polypeptide
EVQLVESGGGLVQPGGSLTLSCVASGSTSSINAMAWYRRAPGKQRELVAGISSDGSKVYADSVKGRFTISRDNAKNSVYLQMNSLRAEDTAVYYCYYFHTVSGSSMRYWGQGTLVTVSS

SEQ ID NO: 1511 - protein, 119 aa, synthetic construct
  REGION 1..119: note = Description of Artificial Sequence: Synthetic polypeptide
EVQLVESGGGLVQPGGSLTLSCVASGSTSSINAIGWYRRAPGKQRELVAGISSDGSSVYADSVKGRFTISRDNAKNSVYLQMNSLRAEDTAVYYCYYFRRVSGSSMRYWGQGTLVTVSS

SEQ ID NO: 1512 - protein, 119 aa, synthetic construct
  REGION 1..119: note = Description of Artificial Sequence: Synthetic polypeptide
EVQLVESGGGLVQPGGSLTLSCVASGSTSSINAMGWYRRAPGKQRELVAGISSDGSKVYSDSVKGRFTISRDNAKNSVYLQMNSLRAEDTAVYYCYYFRLVSGSSMRYWGQGTLVTVSS

SEQ ID NO: 1513 - protein, 119 aa, synthetic construct
  REGION 1..119: note = Description of Artificial Sequence: Synthetic polypeptide
EVQLVESGGGLVQPGGSLTLSCVASGSTSSINAVGWYRRAPGKQRELVAGISSDGSKVYAGSVKGRFTISRDNAKNSVYLQMNSLRAEDTAVYYCYYFRTVSGSYMRYWGQGTLVTVSS

SEQ ID NO: 1514 - protein, 119 aa, synthetic construct
  REGION 1..119: note = Description of Artificial Sequence: Synthetic polypeptide
EVQLVESGGGLVQPGGSLTLSCVASGSTSSINAMAWYRRAPGKQRELAAGISSDNSKVYADSVKGRFTISRDNAKNSVYLQMNSLRAEDTAVYYCYYFRTVGGSSMRYWGQGTLVTVSS

SEQ ID NO: 1515 - protein, 119 aa, synthetic construct
  REGION 1..119: note = Description of Artificial Sequence: Synthetic polypeptide
EVQLVESGGGLVQPGGSLTLSCVASGSTSSINAYGWYRRAPGKQRELVAGISSDGSAVYADSVKGRFTISRDNAKNSVYLQMNSLRAEDTAVYYCYYFRTHSGSSMRYWGQGTLVTVSS

SEQ ID NO: 1516 - protein, 119 aa, synthetic construct
  REGION 1..119: note = Description of Artificial Sequence: Synthetic polypeptide
EVQLVESGGGLVQPGGSLTLSCVASGSTSSINAVGWYRRAPGKQRELVAGISSDGSSVYADSVKGRFTISRDNAKNSVYLQMNSLRAEDTAVYYCYYFRTVSTSSMRYWGQGTLVTVSS

SEQ ID NO: 1517 - protein, 119 aa, synthetic construct
  REGION 1..119: note = Description of Artificial Sequence: Synthetic polypeptide
EVQLVESGGGLVQPGGSLTLSCVASGSKSSINAMGWYRRAPGKQRELPAGISSNGTKVYADSAKVRFTISRDNAKNSVYLQMNSLRAEDTAVYYCYYFRTVLGTSMRYWGQGTLVTVSS

SEQ ID NO: 1518 - protein, 119 aa, synthetic construct
  REGION 1..119: note = Description of Artificial Sequence: Synthetic polypeptide
EVQLVESGGGLVQPGGSLTLSCVASGSTSSINAMAWYRRAPGKQRELVAGISSDGSKLYADSVKGRFTISRDNAKNSVYLQMNSLRAEDTAVYYCYYFRTVSGSSMRYWGQGTLVTVSS

SEQ ID NO: 1519 - protein, 119 aa, synthetic construct
  REGION 1..119: note = Description of Artificial Sequence: Synthetic polypeptide
EVQLVESGGGLVQPGGSLTLSCVASGSVSSINAMGWYRRAPGKQRELVAGISSDGSKVYKDSVKGRFTISRDNAKNSVYLQMNSLRAEDTAVYYCYYFRTVSGSSMGYWGQGTLVTVSS

SEQ ID NO: 1520 - protein, 119 aa, synthetic construct
  REGION 1..119: note = Description of Artificial Sequence: Synthetic polypeptide
EVQLVESGGGLVQPGGSLTLSCVASGSTSSINAMGWYRRAPGKQRELVAGISSDGSLVYADSVKGRFTISRDNAKNSVYLQMNSLRAEDTAVYYCYYFRTVSGSSMRAWGQGTLVTVSS

SEQ ID NO: 1521 - protein, 119 aa, synthetic construct
  REGION 1..119: note = Description of Artificial Sequence: Synthetic polypeptide
EVQLVESGGGLVQPGGSLTLSCVASGSTSSINAMGWYRRAPGKQRELVAGISSDGSLVYADSVKGRFTISRDNAKNSVYLQMNSLRAEDTAVYYCYYFRILSGSSMRYWGQGTLVTVSS

SEQ ID NO: 1522 - protein, 119 aa, synthetic construct
  REGION 1..119: note = Description of Artificial Sequence: Synthetic polypeptide
EVQLVESGGGLVQPGGSLTLSCVASGSTSSINAMAWYRRAPGKQRELVAGISSDGSKVYADSVKGRFTISRDNAKNSVYLQMNSLRAEDTAVYYCYYFRTVQGSSMRYWGQGTLVTVSS

SEQ ID NO: 1523 - protein, 119 aa, synthetic construct
  REGION 1..119: note = Description of Artificial Sequence: Synthetic polypeptide
EVQLVESGGGLVQPGGSLTLSCVASGSTSYINAMGWYRRAPGKQRELVAGISSDGSKVYADSVKGRFTISRDNAKNSVYLQMNSLRAEDTAVYYCYYFRTVSGQSMGYWGQGTLVTVSS

SEQ ID NO: 1524 - protein, 119 aa, synthetic construct
  REGION 1..119: note = Description of Artificial Sequence: Synthetic polypeptide
EVQLVESGGGLVQPGGSLTLSCVASGSTSSINAMGWYRRAPGKQRELVAGVSSDGSKVYADSVKGRFTISRDNAKNSVYLQMNSLRAEDTAVYYCYYFRTVSGSSARYWGQGTLVTVSS

SEQ ID NO: 1525 - protein, 119 aa, synthetic construct
  REGION 1..119: note = Description of Artificial Sequence: Synthetic polypeptide
EVQLVESGGGLVQPGGSLTLSCVASGSTSSINAMGWYRRAPGKQRELPAGISRDGSKVYADSVKGRFTISRDNAKNSVYLQMNSLRAEDTAVYYCYYFRYVSGSSMRYWGQGTLVTVSS

SEQ ID NO: 1526 - protein, 119 aa, synthetic construct
  REGION 1..119: note = Description of Artificial Sequence: Synthetic polypeptide
EVQLVESGGGLVQPGGSLTLSCVASGSTSSINAMGWYRRAPGKQRELAAGISSDGSKLYADSVKGRFTISRDNAKNSVYLQMNSLRAEDTAVYYCYYFRTVSGSSMRYWGQGTLVTVSS

SEQ ID NO: 1527 - protein, 119 aa, synthetic construct
  REGION 1..119: note = Description of Artificial Sequence: Synthetic polypeptide
EVQLVESGGGLVQPGGSLTLSCVASGSTSRINAMGWYRRAPGKQRELVAGISSDGSKVYADSVKGRFTISRDNAKNSVYLQMNSLRAEDTAVYYCYYFRRVSGSSMRYWGQGTLVTVSS

SEQ ID NO: 1528 - protein, 119 aa, synthetic construct
  REGION 1..119: note = Description of Artificial Sequence: Synthetic polypeptide
EVQLVESGGGLVQPGGSLTLSCVASGSTSSINAMAWYRRAPGKQRELAAGISSDGSKVYADSVKGRFTISRDNAKNSVYLQMNSLRAEDTAVYYCYYFHTVSGSSMRYWGQGTLVTVSS

SEQ ID NO: 1529 - protein, 119 aa, synthetic construct
  REGION 1..119: note = Description of Artificial Sequence: Synthetic polypeptide
EVQLVESGGGLVQPGGSLTLSCVASGSTSSINAMAWYRRAPGKQRELVAGISSDGSKVYADSVKGRFTISRDNAKNSVYLQMNSLRAEDTAVYYCYYFRQVSGSSMRYWGQGTLVTVSS

SEQ ID NO: 1530 - protein, 119 aa, synthetic construct
  REGION 1..119: note = Description of Artificial Sequence: Synthetic polypeptide
EVQLVESGGGLVQPGGSLTLSCVASGSTSSINAMGWYRRAPGKQRELVAGISSDTSKVYADSVKGRFTISRDNAKNSVYLQMNSLRAEDTAVYYCYYFRTVSGSYMRYWGQGTLVTVSS

SEQ ID NO: 1531 - protein, 119 aa, synthetic construct
  REGION 1..119: note = Description of Artificial Sequence: Synthetic polypeptide
EVQLVESGGGLVQPGGSLTLSCVASGSTSTINAMGWYRRAPGKQRELVAGISSDGSKVYADSVKGRFTISRDNAKNSVYLQMNSLRAEDTAVYYCYYFRTASGSSMRYWGQGTLVTVSS

SEQ ID NO: 1532 - protein, 119 aa, synthetic construct
  REGION 1..119: note = Description of Artificial Sequence: Synthetic polypeptide
EVQLVESGGGLVQPGGSLTLSCVASGSTSSINAVGWYRRAPGKQRELVAGISSDGSTVYADSVKGRFTISRDNAKNSVYLQMNSLRAEDTAVYYCYYFRTVSGHSMRYWGQGTLVTVSS

SEQ ID NO: 1533 - protein, 119 aa, synthetic construct
  REGION 1..119: note = Description of Artificial Sequence: Synthetic polypeptide
EVQLVESGGGLVQPGGSLTLSCVASGSTSSINAMGWYRRAPGKQRELAAGISKDGSKVYADSAKGRFTISRDNAKNSVYLQMNSLRAEDTAVYYCYYFRTVSGSSSRYWGQGTLVTVSS

SEQ ID NO: 1534 - protein, 119 aa, synthetic construct
  REGION 1..119: note = Description of Artificial Sequence: Synthetic polypeptide
EVQLVESGGGLVQPGGSLTLSCVASGSPSSINAYGWYRRAPGKQRELVAGISSDGSKVYSDSVKGRFTISRDNAKNSVYLQMNSLRAEDTAVYYCYYFRTVSGSSYSYWGQGTLVTVSS

SEQ ID NO: 1535 - protein, 119 aa, synthetic construct
  REGION 1..119: note = Description of Artificial Sequence: Synthetic polypeptide
EVQLVESGGGLVQPGGSLTLSCVASGSPSSINAYGWYRRAPGKQRELVAGISSDGSKVYSDSVKGRFTISRDNAKNSVYLQMNSLRAEDTAVYYCYYFRTVSGSSQSYWGQGTLVTVSS

SEQ ID NO: 1536 - protein, 117 aa, synthetic construct
  REGION 1..117: note = Description of Artificial Sequence: Synthetic polypeptide
EVQLVESGGGLVQPGGSLTLSCAASGSSVKFLSMAWYRQAPGKKRELVAGISADGSTDYIDSVKGRFTISRDNAKNSVYLQMNSLRAEDTAVYYCYAYRWTRRYTYWGQGTLVTVSS

SEQ ID NO: 1537 - protein, 117 aa, synthetic construct
  REGION 1..117: note = Description of Artificial Sequence: Synthetic polypeptide
EVQLVESGGGLVQPGGSLTLSCAASGSSVSFLSLAWYRQAPGKKRELVAGISADGSTAYIDSVKGRFTISRDNAKNSVYLQMNSLRAEDTAVYYCYAYRWRTRYTYWGQGTLVTVSS

SEQ ID NO: 1538 - protein, 117 aa, synthetic construct
  REGION 1..117: note = Description of Artificial Sequence: Synthetic polypeptide
EVQLVESGGGLVQPGGSLTLSCAASGSRVSFLSMAWYRQAPGKKRELVAGISRDGSTDYIDSVKGRFTISRDNAKNSVYLQMNSLRAEDTAVYYCYAYRWTTRRTYWGQGTLVTVSS

SEQ ID NO: 1539 - protein, 117 aa, synthetic construct
  REGION 1..117: note = Description of Artificial Sequence: Synthetic polypeptide
EVQLVESGGGLVQPGGSLTLSCAASGSQVSFLSMAWYRQAPGKKRELVAGISRDGSTDYIDSVKGRFTISRDNAKNSVYLQMNSLRAEDTAVYYCYAYRWTTRYIYWGQGTLVTVSS

SEQ ID NO: 1540 - protein, 117 aa, synthetic construct
  REGION 1..117: note = Description of Artificial Sequence: Synthetic polypeptide
EVQLVESGGGLVQPGGSLTLSCAASGSSVSFLSMAWYRQAPGKKRELVAGISEAGSTDYIDSVKGRFTISRDNAKNSVYLQMNSLRAEDTAVYYCYAYRWRTRYTYWGQGTLVTVSS

SEQ ID NO: 1541 - protein, 117 aa, synthetic construct
  REGION 1..117: note = Description of Artificial Sequence: Synthetic polypeptide
EVQLVESGGGLVQPGGSLTLRCAASGSKVSFLSMAWYRQAPGKKRELVAGISADGSTDYVDSVKGRFTISRDNAKNSVYLQMNSLRAEDTAVYYCYAYRWTRRYTYWGQGTLVTVSS

SEQ ID NO: 1542 - protein, 117 aa, synthetic construct
  REGION 1..117: note = Description of Artificial Sequence: Synthetic polypeptide
EVQLVESGGGLVQPGGSLTLSCAASGSSVGFLSMAWYRQAPGKKRELVAGISADGSTDYIRSVKGRFTISRDNAKNSVYLQMNSLRAEDTAVYYCYAYRWRTRYTYWGQGTLVTVSS

SEQ ID NO: 1543 - protein, 117 aa, synthetic construct
  REGION 1..117: note = Description of Artificial Sequence: Synthetic polypeptide
EVQLVESGGGLVQPGGSLTLSCAASGSSVSFLSMAWYRQAPGKKRELVAGISADGSVDYIDSVKGRFTISRDNAKNSVYLQMNSLRAEDTAVYYCYAYRWTTRYIYWGQGTLVTVSS

SEQ ID NO: 1544 - protein, 117 aa, synthetic construct
  REGION 1..117: note = Description of Artificial Sequence: Synthetic polypeptide
EVQLVESGGGLVQPGGSLTLSCAASGSRVSFLSMAWYRQAPGKKRELVAGISADGSTLYIDSVKGRFTISRDNAKNSVYLQMNSLRAEDTAVYYCYAYRWTTRRTYWGQGTLVTVSS

SEQ ID NO: 1545 - protein, 117 aa, synthetic construct
  REGION 1..117: note = Description of Artificial Sequence: Synthetic polypeptide
EVQLVESGGGLVQPGGSLTLSCAASGSSVSFLSLAWYRQAPGKKRELVAGISTDGSTDYIDSVKGRFTISRDNAKNSVYLQMNSLRAEDTAVYYCYAYRWRTRYTYWGQGTLVTVSS

SEQ ID NO: 1546 - protein, 117 aa, synthetic construct
  REGION 1..117: note = Description of Artificial Sequence: Synthetic polypeptide
EVQLVESGGGLVQPGGSLTLSCAASGSSVSFLSMAWYRQAPGKKRELVAGISGDGSTDYIDSVKGRFTISRDNAKNSVYLQMNSLRAEDTAVYYCYAYRWTTRYTYWGQGTLVTVSS

SEQ ID NO: 1547 - protein, 117 aa, synthetic construct
  REGION 1..117: note = Description of Artificial Sequence: Synthetic polypeptide
EVQLVESGGGLVQPGGSLTLSCAASGSSVQFLSMAWYRQAPGKKRELVAGISADGSTDYINSVKGRFTISRDNAKNSVYLQMNSLRAEDTAVYYCYAYRWRTRYTYWGQGTLVTVSS

SEQ ID NO: 1548 - protein, 117 aa, synthetic construct
  REGION 1..117: note = Description of Artificial Sequence: Synthetic polypeptide
EVQLVESGGGLVQPGGSLTLSCAASGSNVSFLSMAWYRQAPGKKRELVAGISARGSTDYIDSVKGRFTISRDNAKNSVYLQMNSLRAEDTAVYYCYAYHWTTRYTYWGQGTLVTVSS

SEQ ID NO: 1549 - protein, 117 aa, synthetic construct
  REGION 1..117: note = Description of Artificial Sequence: Synthetic polypeptide
EVQLVESGGGLVQPGGSLTLSCVASGSSVKFLSMAWYRQAPGKKRELVAGISADGSTTYIDSVKGRFTISRDNAKNSVYLQMNSLRAEDTAVYYCYAYRWTTRRTYWGQGTLVTVSS

SEQ ID NO: 1550 - protein, 117 aa, synthetic construct
  REGION 1..117: note = Description of Artificial Sequence: Synthetic polypeptide
EVQLVESGGGLVQPGGSLTLSCAASGKSVSFLSMAWYRQAPGKKRELVAGISKDGSTDYIDSVKGRFTISRDNAKNSVYLQMNSLRAEDTAVYYCYAYRWTTRYTYWGQGTLVTVSS

SEQ ID NO: 1551 - protein, 117 aa, synthetic construct
  REGION 1..117: note = Description of Artificial Sequence: Synthetic polypeptide
EVQLVESGGGLVQPGGSLTLSCAASGSRVSFLSMAWYRQAPGKKRELVAGISADGSTTYIDSVKGRFTISRDNAKNSVYLQMNSLRAEDTAVYYCYAYRWTTRYTYWGQGTLVTVSS

SEQ ID NO: 1552 - protein, 117 aa, synthetic construct
  REGION 1..117: note = Description of Artificial Sequence: Synthetic polypeptide
EVQLVESGGGLVQPGGSLTLSCAASGSHVSFLSMAWYRQAPGKKRELVAGISANGSTDYIDSVKGRFTISRDNAKNSVYLQMNSLRAEDTAVYYCYAYRWTTRYAYWGQGTLVTVSS

SEQ ID NO: 1553 - protein, 117 aa, synthetic construct
  REGION 1..117: note = Description of Artificial Sequence: Synthetic polypeptide
EVQLVESGGGLVQPGGSLTLSCAASGSSVSFLSMAWYRQAPGKKRELVAGISRDGSTDYIDSVKGRFTISRDNAKNSVYLQMNSLRAEDTAVYYCYAYRWVTRYTYWGQGTLVTVSS

SEQ ID NO: 1554 - protein, 117 aa, synthetic construct
  REGION 1..117: note = Description of Artificial Sequence: Synthetic polypeptide
EVQLVESGGGLVQPGGSLTLSCAASGSSVSFLSMAWYRQAPGKKRELVAGISADGSADYIDSVKGRFTISRDNAKNSVYLQMNSLRAEDTAVYYCYAYRWVTRYTYWGQGTLVTVSS

SEQ ID NO: 1555 - protein, 117 aa, synthetic construct
  REGION 1..117: note = Description of Artificial Sequence: Synthetic polypeptide
EVQLVESGGGLVQPGGSLTLSCAASGSSVRFLSMAWYRQAPGKKRELVAGISAHGSTDYIDSVKGRFTISRDNAKNSVYLQMNSLRAEDTAVYYCYAYRWSTRYTYWGQGTLVTVSS

SEQ ID NO: 1556 - protein, 117 aa, synthetic construct
  REGION 1..117: note = Description of Artificial Sequence: Synthetic polypeptide
EVQLVESGGGLVQPGGSLTLSCAASGSSVRFLSMAWYRQAPGKKRELVAGISADGSTIYIDSVKGRFTISRDNAKNSVYLQMNSLRAEDTAVYYCYAYRWRTRYTYWGQGTLVTVSS

SEQ ID NO: 1557 - protein, 117 aa, synthetic construct
  REGION 1..117: note = Description of Artificial Sequence: Synthetic polypeptide
EVQLVESGGGLVQPGGSLTLSCAASGSSVRFLSMAWYRQAPGKKRELVAGISRDGSTVYIDSVKGRFTISRDNAKNSVYLQMNSLRAEDTAVYYCYAYRWTTRGTYWGQGTLVTVSS

SEQ ID NO: 1558 - protein, 117 aa, synthetic construct
  REGION 1..117: note = Description of Artificial Sequence: Synthetic polypeptide
EVQLVESGGGLVQPGGSLTLSCAASGSHVSFLSMAWYRQAPGKKRELVAGISADGPTDYIDSVKGRFTISRDNAKNSVYLQMNSLRAEDTAVYYCYAYRWDTRYTYWGQGTLVTVSS

SEQ ID NO: 1559 - protein, 117 aa, synthetic construct
  REGION 1..117: note = Description of Artificial Sequence: Synthetic polypeptide
EVQLVESGGGLVQPGGSLTLSCVASGTSVSFLSMAWYRQAPGKKRELVAGISADGSTTYIDSVKGRFTISRDNAKNSVYLQMNSLRAEDTAVYYCYAYRWTTRRTYWGQGTLVTVSS

SEQ ID NO: 1560 - protein, 117 aa, synthetic construct
  REGION 1..117: note = Description of Artificial Sequence: Synthetic polypeptide
EVQLVESGGGLVQPGGSLTLSCAASGTSVSFLSIAWYRQAPGKKRELVAGISADGSTDYIASVKGRFTISRDNAKNSVYLQMNSLRAEDTAVYYCYAYRWRTRYTYWGQGTLVTVSS

SEQ ID NO: 1561 - protein, 117 aa, synthetic construct
  REGION 1..117: note = Description of Artificial Sequence: Synthetic polypeptide
EVQLVESGGGLVQPGGSLTLSCAASGSSVKFLSMAWYRQAPGKKRELVAGISLDGSTDYIDSVKGRFTISRDNAKNSVYLQMNSLRAEDTAVYYCYAYRWTGRYTYWGQGTLVTVSS

SEQ ID NO: 1562 - protein, 117 aa, synthetic construct
  REGION 1..117: note = Description of Artificial Sequence: Synthetic polypeptide
EVQLVESGGGLVQPGGSLTLSCAASGSSVSFLSMAWYRQAPGKKRELVAGISADGSTIYIDSVKGRFTISRDNAKNSVYLQMNSLRAEDTAVYYCYAYRWRTRYTYWGQGTLVTVSS

SEQ ID NO: 1563 - protein, 117 aa, synthetic construct
  REGION 1..117: note = Description of Artificial Sequence: Synthetic polypeptide
EVQLVESGGGLVQPGGSLTLSCAASGSSVRFLSMAWYRQAPGKKRELVAGISAHGSTDYIDSVKGRFTISRDNAKNSVYLQMNSLRAEDTAVYYCYAYRWRTRYTYWGQGTLVTVSS

SEQ ID NO: 1564 - protein, 117 aa, synthetic construct
  REGION 1..117: note = Description of Artificial Sequence: Synthetic polypeptide
EVQLVESGGGLVQPGGSLTLSCAASGSSVSFLSMAWYRQAPGKKRELVAGISRDGSTDYIDSVKGRFTISRDNAKNSVYLQMNSLRAEDTAVYYCYAYRWITRYTYWGQGTLVTVSS

SEQ ID NO: 1565 - protein, 117 aa, synthetic construct
  REGION 1..117: note = Description of Artificial Sequence: Synthetic polypeptide
EVQLVESGGGLVQPGGSLTLSCAASGSSVRFLSMAWYRQAPGKKRELVAGISRDGSTDYIDSVKGRFTISRDNAKNSVYLQMNSLRAEDTAVYYCYAYRWITRYTYWGQGTLVTVSS

SEQ ID NO: 1566 - protein, 117 aa, synthetic construct
  REGION 1..117: note = Description of Artificial Sequence: Synthetic polypeptide
EVQLVESGGGLVQPGGSLTLSCAASGSSVVFLSMAWYRQAPGKKRELVAGISADGSMDYIDSVKGRFTISRDNAKNSVYLQMNSLRAEDTAVYYCYAYRWRTRYTYWGQGTLVTVSS

SEQ ID NO: 1567 - protein, 117 aa, synthetic construct
  REGION 1..117: note = Description of Artificial Sequence: Synthetic polypeptide
EVQLVESGGGLVQPGGSLTLSCAASGSSVRFLSMAWYRQAPGKKRELVAGISADGSTDYIDSVKGRFTISRDNAKNSVYLQMNSLRAEDTAVYYCYAYRWTRRYTYWGQGTLVTVSS

SEQ ID NO: 1568 - protein, 117 aa, synthetic construct
  REGION 1..117: note = Description of Artificial Sequence: Synthetic polypeptide
EVQLVESGGGLVQPGGSLTLSCAASGSSVRFLSMAWYRQAPGKKRELVAGISADGSTDYIDSVKGRFTISRDNAKNSVYLQMNSLRAEDTAVYYCYAYSWTTRYTYWGQGTLVTVSS

SEQ ID NO: 1569 - protein, 117 aa, synthetic construct
  REGION 1..117: note = Description of Artificial Sequence: Synthetic polypeptide
EVQLVESGGGLVQPGGSLTLSCAASGSSVRFLSMAWYRQAPGKKRELVAGISANGSTDYIDSVKGRFTISRDNAKNSVYLQMNSLRAEDTAVYYCYAYRWTNRYTYWGQGTLVTVSS

SEQ ID NO: 1570 - protein, 117 aa, synthetic construct
  REGION 1..117: note = Description of Artificial Sequence: Synthetic polypeptide
EVQLVESGGGLVQPGGSLTLSCAASGSSVSRLSMAWYRQAPGKKRELVAGISANGSTTYIDSVKGRFTISRDNAKNSVYLQMNSLRAEDTAVYYCYAYRWTTRYRYWGQGTLVTVSS

SEQ ID NO: 1571 - protein, 117 aa, synthetic construct
  REGION 1..117: note = Description of Artificial Sequence: Synthetic polypeptide
EVQLVESGGGLVQPGGSLTLSCAASGSSKSFLSMAWYRQAPGKKRELVAGISADGSTSYIDSVKGRFTISRDNAKNSVYLQMNSLRAEDTAVYYCYAYRWTTRYTYWGQGTLVTVSS

SEQ ID NO: 1572 - protein, 117 aa, synthetic construct
  REGION 1..117: note = Description of Artificial Sequence: Synthetic polypeptide
EVQLVESGGGLVQPGGSLTLSCAASGSSVSRLSMAWYRQAPGKKRELVAGISADGSRDYIDSVKGRFTISRDNAKNSVYLQMNSLRAEDTAVYYCYAYRWTTRYKYWGQGTLVTVSS

SEQ ID NO: 1573 - protein, 117 aa, synthetic construct
  REGION 1..117: note = Description of Artificial Sequence: Synthetic polypeptide
EVQLVESGGGLVQPGGSLTLSCAASGSSVKFLSMAWYRQAPGKKRELVAGISADGSTMYIDSVKGRFTISRDNAKNSVYLQMNSLRAEDTAVYYCYAYRWHTRYTYWGQGTLVTVSS

SEQ ID NO: 1574 - protein, 117 aa, synthetic construct
  REGION 1..117: note = Description of Artificial Sequence: Synthetic polypeptide
EVQLVESGGGLVQPGGSLTLSCAASGSGVRFLSMAWYRQAPGKKRELVAGISPDGSTDYIDSVKGRFTISRDNAKNSVYLQMNSLRAEDTAVYYCYAYRWTRRYTYWGQGTLVTVSS

SEQ ID NO: 1575 - protein, 117 aa, synthetic construct
  REGION 1..117: note = Description of Artificial Sequence: Synthetic polypeptide
EVQLVESGGGLVQPGGSLTLSCAASGSSVRFLSMAWYRQAPGKKRELVAGISGDGSTDYIDSVKGRFTISRDNAKNSVYLQMNSLRAEDTAVYYCYAYRWMTRYTYWGQGTLVTVSS

SEQ ID NO: 1576 - protein, 117 aa, synthetic construct
  REGION 1..117: note = Description of Artificial Sequence: Synthetic polypeptide
EVQLVESGGGLVQPGGSLTLSCAASGSSVHFLSMAWYRQAPGKKRELVAGISRDGSTDYIDSVKGRFTISRDNAKNSVYLQMNSLRAEDTAVYYCYAYRWTTRYRYWGQGTLVTVSS

SEQ ID NO: 1577 - protein, 117 aa, synthetic construct
  REGION 1..117: note = Description of Artificial Sequence: Synthetic polypeptide
EVQLVESGGGLVQPGGSLTLSCAASGSSVRFLSMAWYRQAPGKKRELVAGISRDGSTDYIDSVKGRFTISRDNAKNSVYLQMNSLRAEDTAVYYCYAYRWSTRYTYWGQGTLVTVSS

SEQ ID NO: 1578 - protein, 117 aa, synthetic construct
  REGION 1..117: note = Description of Artificial Sequence: Synthetic polypeptide
EVQLVESGGGLVQPGGSLTLSCAASGSKVSFLSMAWYRQAPGKKRELVAGISRDGSTDYIDSVKGRFTISRDNAKNSVYLQMNSLRAEDTAVYYCYAYRWTTRYTFWGQGTLVTVSS

SEQ ID NO: 1579 - protein, 117 aa, synthetic construct
  REGION 1..117: note = Description of Artificial Sequence: Synthetic polypeptide
EVQLVESGGGLVQPGGSLTLSCAASGSSVSFLSMAWYRQAPGKKRELVAGISADGSTDYIDSVKGRFTISRDNAKNSVYLQMNSLRAEDTAVYYCYAYRWRTRYTYWGQGTLVTVSS

SEQ ID NO: 1580 - protein, 117 aa, synthetic construct
  REGION 1..117: note = Description of Artificial Sequence: Synthetic polypeptide
EVQLVESGGGLVQPGGSLTLSCAASGSKVSFLSMAWYRQAPGKKRELVAGISTDGSTDYIDSVKGRFTISRDNAKNSVYLQMNSLRAEDTAVYYCYAYRWTTRRTYWGQGTLVTVSS

SEQ ID NO: 1581 - protein, 117 aa, synthetic construct
  REGION 1..117: note = Description of Artificial Sequence: Synthetic polypeptide
EVQLVESGGGLVQPGGSLTLSCAASGSRVSFLSMAWYRQAPGKKRELVAGISADGSTSYIDSVKGRFTISRDNAKNSVYLQMNSLRAEDTAVYYCYAYRWATRYTYWGQGTLVTVSS

SEQ ID NO: 1582 - protein, 117 aa, synthetic construct
  REGION 1..117: note = Description of Artificial Sequence: Synthetic polypeptide
EVQLVESGGGLVQPGGSLTLSCAASGSRVSFLSMAWYRQAPGKKRELVAGISADGSTLYIDSVKGRFTISRDNAKNSVYLQMNSLRAEDTAVYYCYAYRWHTRYTYWGQGTLVTVSS

SEQ ID NO: 1583 - protein, 117 aa, synthetic construct
  REGION 1..117: note = Description of Artificial Sequence: Synthetic polypeptide
EVQLVESGGGLVQPGGSLTLSCAASGSSVRFLSMAWYRQAPGKKRELVAGISRDGSTDYIDSVKGRFTISRDNAKNSVYLQMNSLRAEDTAVYYCYAYRWGTRYTYWGQGTLVTVSS

SEQ ID NO: 1584 - protein, 117 aa, synthetic construct
  REGION 1..117: note = Description of Artificial Sequence: Synthetic polypeptide
EVQLVESGGGLVQPGGSLTLSCAASYSSVSRLSMAWYRQAPGKKRELVAGISADGSTVYIDSVKGRFTISRDNAKNSVYLQMNSLRAEDTAVYYCYAYRWTTRNTYWGQGTLVTVSS

SEQ ID NO: 1585 - protein, 117 aa, synthetic construct
  REGION 1..117: note = Description of Artificial Sequence: Synthetic polypeptide
EVQLVESGGGLVQPGGSLTLSCAASGSSVSFLSMAWYRQAPGKKRELVAGISTDGSTDYIDSVKGRFTISRDNAKNSVYLQMNSLRAEDTAVYYCYAYRWRTRYTYWGQGTLVTVSS

SEQ ID NO: 1586 - protein, 117 aa, synthetic construct
  REGION 1..117: note = Description of Artificial Sequence: Synthetic polypeptide
EVQLVESGGGLVQPGGSLTLSCAASGSSVSFLSMAWYRQAPGKKRELVAGISADGSTLYIDSVKGRFTISRDNAKNSVYLQMNSLRAEDTAVYYCYAYRWTTRYAYWGQGTLVTVSS

SEQ ID NO: 1587 - protein, 117 aa, synthetic construct
  REGION 1..117: note = Description of Artificial Sequence: Synthetic polypeptide
EVQLVESGGGLVQPGGSLTLSCAASGSSVSFLSMAWYRQAPGKKRELVAGISADGRTDYIDSVKGRFTISRDNAKNSVYLQMNSLRAEDTAVYYCYAYRWRTRYTYWGQGTLVTVSS

SEQ ID NO: 1588 - protein, 117 aa, synthetic construct
  REGION 1..117: note = Description of Artificial Sequence: Synthetic polypeptide
EVQLVESGGGLVQPGGSLTLSCVASGTSVSFLSMAWYRQAPGKKRELVAGISADGSTIYIDSVKGRFTISRDNAKNSVYLQMNSLRAEDTAVYYCYAYRWTTRRTYWGQGTLVTVSS

SEQ ID NO: 1589 - protein, 117 aa, synthetic construct
  REGION 1..117: note = Description of Artificial Sequence: Synthetic polypeptide
EVQLVESGGGLVQPGGSLTLSCAASGSSVKFLSMAWYRQAPGKKRELVAGISADGSTLYIDSVKGRFTISRDNAKNSVYLQMNSLRAEDTAVYYCYAYRWTTRRTYWGQGTLVTVSS

SEQ ID NO: 1590 - protein, 117 aa, synthetic construct
  REGION 1..117: note = Description of Artificial Sequence: Synthetic polypeptide
EVQLVESGGGLVQPGGSLTLSCAASGSSVSFLSMAWYRQAPGKKRELVAGISRDGSTDYIDSVKGRFTISRDNAKNSVYLQMNSLRAEDTAVYYCYAYRWTSRYTYWGQGTLVTVSS

SEQ ID NO: 1591 - protein, 117 aa, synthetic construct
  REGION 1..117: note = Description of Artificial Sequence: Synthetic polypeptide
EVQLVESGGGLVQPGGSLTLSCAASGSRVSFLSMAWYRQAPGKKRELVAGISKDGSTDYIDSVKGRFTISRDNAKNSVYLQMNSLRAEDTAVYYCYAYRWTTRVTYWGQGTLVTVSS

SEQ ID NO: 1592 - protein, 117 aa, synthetic construct
  REGION 1..117: note = Description of Artificial Sequence: Synthetic polypeptide
EVQLVESGGGLVQPGGSLTLSCAASGSSVSVLSMAWYRQAPGKKRELVAGISADGSTDYIGSVKGRFTISRDNAKNSVYLQMNSLRAEDTAVYYCYAYRWTTRTTYWGQGTLVTVSS

SEQ ID NO: 1593 - protein, 117 aa, synthetic construct
  REGION 1..117: note = Description of Artificial Sequence: Synthetic polypeptide
EVQLVESGGGLVQPGGSLTLSCAASGSSVSFLSMAWYRQAPGKKRELVAGISVDGSTDYIDSVKGRFTISRDNAKNSVYLQMNSLRAEDTAVYYCYAYRWRTRYTYWGQGTLVTVSS

SEQ ID NO: 1594 - protein, 117 aa, synthetic construct
  REGION 1..117: note = Description of Artificial Sequence: Synthetic polypeptide
EVQLVESGGGLVQPGGSLTLSCAASGSRVSFLSMAWYRQAPGKKRELVAGISADGSTGYIDSVKGRFTISRDNAKNSVYLQMNSLRAEDTAVYYCYAYRWATRYTYWGQGTLVTVSS

SEQ ID NO: 1595 - protein, 117 aa, synthetic construct
  REGION 1..117: note = Description of Artificial Sequence: Synthetic polypeptide
EVQLVESGGGLVQPGGSLTLSCVASGSSVKFLSMAWYRQAPGKKRELVAGISGDGSTTYIDSVKGRFTISRDNAKNSVYLQMNSLRAEDTAVYYCYAYRWTTRRTYWGQGTLVTVSS

SEQ ID NO: 1596 - protein, 117 aa, synthetic construct
  REGION 1..117: note = Description of Artificial Sequence: Synthetic polypeptide
EVQLVESGGGLVQPGGSLTLSCAASGSSVRFLSMAWYRQAPGKKRELVAGISTDGSTDYIDSVKGRFTISRDNAKNSVYLQMNSLRAEDTAVYYCYALRWTTRYTYWGQGTLVTVSS

SEQ ID NO: 1597 - protein, 117 aa, synthetic construct
  REGION 1..117: note = Description of Artificial Sequence: Synthetic polypeptide
EVQLVESGGGLVQPGGSLTLSCAASGSSVSQLSMAWYRQAPGKKRELVAGISADGSTDYFDSVKGRFTISRDNAKNSVYLQMNSLRAEDTAVYYCYAYRWTTRGTYWGQGTLVTVSS

SEQ ID NO: 1598 - protein, 117 aa, synthetic construct
  REGION 1..117: note = Description of Artificial Sequence: Synthetic polypeptide
EVQLVESGGGLVQPGGSLTLSCAASGSRVSFLSMAWYRQAPGKKRELVAGISADGSTSYIDSVKGRFTISRDNAKNSVYLQMNSLRAEDTAVYYCYAYRWRTRYTYWGQGTLVTVSS

SEQ ID NO: 1599 - protein, 117 aa, synthetic construct
  REGION 1..117: note = Description of Artificial Sequence: Synthetic polypeptide
EVQLVESGGGLVQPGGSLTLSCAASKSSVSFLSMAWYRQAPGKKRELVAGISADGSTDYIDSVKGRFTISRDNAKNSVYLQMNSLRAEDTAVYYCYAYRWTTRATYWGQGTLVTVSS

SEQ ID NO: 1600 - protein, 117 aa, synthetic construct
  REGION 1..117: note = Description of Artificial Sequence: Synthetic polypeptide
EVQLVESGGGLVQPGGSLTLSCAASGSSVSFLSMAWYRQAPGKKRELVAGISADGSTAYIDSVKGRFTISRDNAKNSVYLQMNSLRAEDTAVYYCYAYRWTTRRTYWGQGTLVTVSS

SEQ ID NO: 1601 - protein, 117 aa, synthetic construct
  REGION 1..117: note = Description of Artificial Sequence: Synthetic polypeptide
EVQLVESGGGLVQPGGSLTLSCAASGSSVKFLSMAWYRQAPGKKRELVAGISADGSTVYIDSVKGRFTISRDNAKNSVYLQMNSLRAEDTAVYYCYAYRWPTRYTYWGQGTLVTVSS

SEQ ID NO: 1602 - protein, 117 aa, synthetic construct
  REGION 1..117: note = Description of Artificial Sequence: Synthetic polypeptide
EVQLVESGGGLVQPGGSLTLSCAASGSSVRFLSMAWYRQAPGKKRELVAGISQDGSTDYIDSVKGRFTISRDNAKNSVYLQMNSLRAEDTAVYYCYAYRWRTRYTYWGQGTLVTVSS

SEQ ID NO: 1603 - protein, 117 aa, synthetic construct
  REGION 1..117: note = Description of Artificial Sequence: Synthetic polypeptide
EVQLVESGGGLVQPGGSLTLSCAASGSSVRFLSMAWYRQAPGKKRELVAGISNDGSTDYIDSVKGRFTISRDNAKNSVYLQMNSLRAEDTAVYYCYAYRWKTRYTYWGQGTLVTVSS

SEQ ID NO: 1604 - protein, 117 aa, synthetic construct
  REGION 1..117: note = Description of Artificial Sequence: Synthetic polypeptide
EVQLVESGGGLVQPGGSLTLSCAASGSRVSFLSMAWYRQAPGKKRELVAGISARGSTDYIDSVKGRFTISRDNAKNSVYLQMNSLRAEDTAVYYCYAYRWSTRYTYWGQGTLVTVSS

SEQ ID NO: 1605 - protein, 117 aa, synthetic construct
  REGION 1..117: note = Description of Artificial Sequence: Synthetic polypeptide
EVQLVESGGGLVQPGGSLTLSCAASGSSVSFLSLAWYRQAPGKKRELVAGISADGSTDYIDSVKGRFTISRDNAKNSVYLQMNSLRAEDTAVYYCYAYRWKTRRTYWGQGTLVTVSS

SEQ ID NO: 1606 - protein, 117 aa, synthetic construct
  REGION 1..117: note = Description of Artificial Sequence: Synthetic polypeptide
EVQLVESGGGLVQPGGSLTLSCAASGSSVRFLSMAWYRQAPGKKRELVAGISRDGSTDYIDSVKGRFTISRDNAKNSVYLQMNSLRAEDTAVYYCYAYRWTTRRTYWGQGTLVTVSS

SEQ ID NO: 1607 - protein, 117 aa, synthetic construct
  REGION 1..117: note = Description of Artificial Sequence: Synthetic polypeptide
EVQLVESGGGLVQPGGSLTLSCAASGSKVSFLSMAWYRQAPGKKRELVAGISADGSTLYIDSVKGRFTISRDNAKNSVYLQMNSLRAEDTAVYYCYAYRWTTRYRYWGQGTLVTVSS

SEQ ID NO: 1608 - protein, 117 aa, synthetic construct
  REGION 1..117: note = Description of Artificial Sequence: Synthetic polypeptide
EVQLVESGGGLVQPGGSLTLSCAASGSSVSFLSMAWYRQAPGKKRELVAGISADGSTNYIDSVKGRFTISRDNAKNSVYLQMNSLRAEDTAVYYCYAYRWRTRYTYWGQGTLVTVSS

SEQ ID NO: 1609 - protein, 117 aa, synthetic construct
  REGION 1..117: note = Description of Artificial Sequence: Synthetic polypeptide
EVQLVESGGGLVQPGGSLTLSCAASGSSVRFLSMAWYRQAPGKKRELVAGISADGSTVYIDSVKGRFTISRDNAKNSVYLQMNSLRAEDTAVYYCYAYRWTTRYKYWGQGTLVTVSS

SEQ ID NO: 1610 - protein, 117 aa, synthetic construct
  REGION 1..117: note = Description of Artificial Sequence: Synthetic polypeptide
EVQLVESGGGLVQPGGSLTLSCAASGSKVSFLSMAWYRQAPGKKRELVAGISADGSTTYIDSVKGRFTISRDNAKNSVYLQMNSLRAEDTAVYYCYAYRWKTRYTYWGQGTLVTVSS

SEQ ID NO: 1611 - protein, 117 aa, synthetic construct
  REGION 1..117: note = Description of Artificial Sequence: Synthetic polypeptide
EVQLVESGGGLVQPGGSLTLSCAASGSSVKFLSMAWYRQAPGKKRELVAGISADGSTDYIGSVKGRFTISRDNAKNSVYLQMNSLRAEDTAVYYCYAYRWTTRVTYWGQGTLVTVSS

SEQ ID NO: 1612 - protein, 117 aa, synthetic construct
  REGION 1..117: note = Description of Artificial Sequence: Synthetic polypeptide
EVQLVESGGGLVQPGGSLTLSCAASGSSVKFLSMAWYRQAPGKKRELVAGISRDGSTDYIDSVKGRFTISRDNAKNSVYLQMNSLRAEDTAVYYCYAYRWTTRFTYWGQGTLVTVSS

SEQ ID NO: 1613 - protein, 117 aa, synthetic construct
  REGION 1..117: note = Description of Artificial Sequence: Synthetic polypeptide
EVQLVESGGGLVQPGGSLTLSCAASGSRVSFLSMAWYRQAPGKKRELVAGISADGSTTYIDSVKGRFTISRDNAKNSVYLQMNSLRAEDTAVYYCYAYRWTTRFTYWGQGTLVTVSS

SEQ ID NO: 1614 - protein, 117 aa, synthetic construct
  REGION 1..117: note = Description of Artificial Sequence: Synthetic polypeptide
EVQLVESGGGLVQPGGSLTLSCAASGSSVLFLSMAWYRQAPGKKRELVAGVSSDGSTDYIDSVKGRFTISRDNAKNSVYLQMNSLRAEDTAVYYCYAYRWRTRYTYWGQGTLVTVSS

SEQ ID NO: 1615 - protein, 117 aa, synthetic construct
  REGION 1..117: note = Description of Artificial Sequence: Synthetic polypeptide
EVQLVESGGGLVQPGGSLTLSCAASGSRVSFLSMAWYRQAPGKKRELVAGISADGHTDYIDSVKGRFTISRDNAKNSVYLQMNSLRAEDTAVYYCYAYRWTTRYTHWGQGTLVTVSS

SEQ ID NO: 1616 - protein, 117 aa, synthetic construct
  REGION 1..117: note = Description of Artificial Sequence: Synthetic polypeptide
EVQLVESGGGLVQPGGSLTLSCAASGSRVSFLSMAWYRQAPGKKRELVAGISADGSTDYFDSVKGRFTISRDNAKNSVYLQMNSLRAEDTAVYYCYAYRWTRRYTYWGQGTLVTVSS

SEQ ID NO: 1617 - protein, 117 aa, synthetic construct
  REGION 1..117: note = Description of Artificial Sequence: Synthetic polypeptide
EVQLVESGGGLVQPGGSLTLSCAASGSSVGFLSMAWYRQAPGKKRELVAGISADGSTVYIDSVKGRFTISRDNAKNSVYLQMNSLRAEDTAVYYCYAYRWTTRYTYWGQGTLVTVSS

SEQ ID NO: 1618 - protein, 117 aa, synthetic construct
  REGION 1..117: note = Description of Artificial Sequence: Synthetic polypeptide
EVQLVESGGGLVQPGGSLTLSCAASGSSVSFMSMAWYRQAPGKKRELVAGISADGSTDYIASVKGRFTISRDNAKNSVYLQMNSLRAEDTAVYYCYAYRWTTRSTYWGQGTLVTVSS

SEQ ID NO: 1619 - protein, 117 aa, synthetic construct
  REGION 1..117: note = Description of Artificial Sequence: Synthetic polypeptide
EVQLVESGGGLVQPGGSLTLSCAASGSSVSFLSMAWYRQAPGKKRELVAGISADGSTDYISSVKGRFTISRDNAKNSVYLQMNSLRAEDTAVYYCYAYSWTTRYTYWGQGTLVTVSS

SEQ ID NO: 1620 - protein, 117 aa, synthetic construct
  REGION 1..117: note = Description of Artificial Sequence: Synthetic polypeptide
EVQLVESGGGLVQPGGSLTLSCAASGSSVTFLSMAWYRQAPGKKRELVAGISADGSTVYIDSVKGRFTISRDNAKNSVYLQMNSLRAEDTAVYYCYAYRWTTRGTYWGQGTLVTVSS

SEQ ID NO: 1621 - protein, 117 aa, synthetic construct
  REGION 1..117: note = Description of Artificial Sequence: Synthetic polypeptide
EVQLVESGGGLVQPGGSLTLSCAASGSSVRFLSMAWYRQAPGKKRELVAGISADGSTVYIDSVKGRFTISRDNAKNSVYLQMNSLRAEDTAVYYCYAYRWKTRYTYWGQGTLVTVSS

SEQ ID NO: 1622 - protein, 117 aa, synthetic construct
  REGION 1..117: note = Description of Artificial Sequence: Synthetic polypeptide
EVQLVESGGGLVQPGGSLTLSCAASGSKVSFLSMAWYRQAPGKKRELVAGISADGSTTYIDSVKGRFTISRDNAKNSVYLQMNSLRAEDTAVYYCYAYRWTTRFTYWGQGTLVTVSS

SEQ ID NO: 1623 - protein, 117 aa, synthetic construct
  REGION 1..117: note = Description of Artificial Sequence: Synthetic polypeptide
EVQLVESGGGLVQPGGSLTLSCAASGSKVSFMSMAWYRQAPGKKRELVAGISVDGSTDYIDSVKGRFTISRDNAKNSVYLQMNSLRAEDTAVYYCYAYRWRTRYTYWGQGTLVTVSS

SEQ ID NO: 1624 - protein, 117 aa, synthetic construct
  REGION 1..117: note = Description of Artificial Sequence: Synthetic polypeptide
EVQLVESGGGLVQPGGSLTLSCAASGSSVSNLSMAWYRQAPGKKRELVAGISADGSTAYIDSVKGRFTISRDNAKNSVYLQMNSLRAEDTAVYYCYAYRWTTRRTYWGQGTLVTVSS

SEQ ID NO: 1625 - protein, 117 aa, synthetic construct
  REGION 1..117: note = Description of Artificial Sequence: Synthetic polypeptide
EVQLVESGGGLVQPGGSLTLSCAASNSSVSKLSMAWYRQAPGKKRELVAGISADGSTAYIDSVKGRFTISRDNAKNSVYLQMNSLRAEDTAVYYCYAYRWSTRYTYWGQGTLVTVSS

SEQ ID NO: 1626 - protein, 117 aa, synthetic construct
  REGION 1..117: note = Description of Artificial Sequence: Synthetic polypeptide
EVQLVESGGGLVQPGGSLTLSCAASGSKVSFLSMAWYRQAPGKKRELVAGISADGSKDYIDSVKGRFTISRDNAKNSVYLQMNSLRAEDTAVYYCYAYRWTTRLTYWGQGTLVTVSS

SEQ ID NO: 1627 - protein, 117 aa, synthetic construct
  REGION 1..117: note = Description of Artificial Sequence: Synthetic polypeptide
EVQLVESGGGLVQPGGSLTLSCVASGSQVSFLSMAWYRQAPGKKRELVAGISADGSTDYFDSVKGRFTISRDNAKNSVYLQMNSLRAEDTAVYYCYAYRWTRRYTYWGQGTLVTVSS

SEQ ID NO: 1628 - protein, 117 aa, synthetic construct
  REGION 1..117: note = Description of Artificial Sequence: Synthetic polypeptide
EVQLVESGGGLVQPGGSLTLSCAASGSKVSFMSMAWYRQAPGKKRELVAGISADGSTDYIDSVKGRFTISRDNAKNSVYLQMNSLRAEDTAVYYCYAYRWTTRLTYWGQGTLVTVSS

SEQ ID NO: 1629 - protein, 117 aa, synthetic construct
  REGION 1..117: note = Description of Artificial Sequence: Synthetic polypeptide
EVQLVESGGGLVQPGGSLTLSCAASGSRVSFLSMAWYRQAPGKKRELVAGISADGSTVYIDSVKGRFTISRDNAKNSVYLQMNSLRAEDTAVYYCYAYRWTRRYTYWGQGTLVTVSS

SEQ ID NO: 1630 - protein, 117 aa, synthetic construct
  REGION 1..117: note = Description of Artificial Sequence: Synthetic polypeptide
EVQLVESGGGLVQPGGSLTLSCAASGSSVRFLSMAWYRQAPGKKRELVAGISADGSTVYIDSVKGRFTISRDNAKNSVYLQMNSLRAEDTAVYYCYAYRWTTRRTYWGQGTLVTVSS

SEQ ID NO: 1631 - protein, 117 aa, synthetic construct
  REGION 1..117: note = Description of Artificial Sequence: Synthetic polypeptide
EVQLVESGGGLVQPGGSLTLSCAASGSKVSFLSMAWYRQAPGKKRELVAGISARGSTDYIDSVKGRFTISRDNAKNSVYLQMNSLRAEDTAVYYCYAYQWTTRYTYWGQGTLVTVSS

SEQ ID NO: 1632 - protein, 117 aa, synthetic construct
  REGION 1..117: note = Description of Artificial Sequence: Synthetic polypeptide
EVQLVESGGGLVQPGGSLTLSCAASGSSVRFLSMAWYRQAPGKKRELVAGISATGSTDYIDSVKGRFTISRDNAKNSVYLQMNSLRAEDTAVYYCYAYRWTRRYTYWGQGTLVTVSS

SEQ ID NO: 1633 - protein, 117 aa, synthetic construct
  REGION 1..117: note = Description of Artificial Sequence: Synthetic polypeptide
EVQLVESGGGLVQPGGSLTLSCAASGSSVSFLSIAWYRQAPGKKRELVAGISKDGSTDYIDSVKGRFTISRDNAKNSVYLQMNSLRAEDTAVYYCYAYRWTTRMTYWGQGTLVTVSS

SEQ ID NO: 1634 - protein, 117 aa, synthetic construct
  REGION 1..117: note = Description of Artificial Sequence: Synthetic polypeptide
EVQLVESGGGLVQPGGSLTLSCAASGSSSSFLSMAWYRQAPGKKRELVAGISADGSTVYIDSVKGRFTISRDNAKNSVYLQMNSLRAEDTAVYYCYAYRWTTRRTYWGQGTLVTVSS

SEQ ID NO: 1635 - protein, 117 aa, synthetic construct
  REGION 1..117: note = Description of Artificial Sequence: Synthetic polypeptide
EVQLVESGGGLVQPGGSLTLSCAASGSSVKFLSMAWYRQAPGKKRELVAGISPDGSTDYIDSVKGRFTISRDNAKNSVYLQMNSLRAEDTAVYYCYAYRWTTRYRYWGQGTLVTVSS

SEQ ID NO: 1636 - protein, 117 aa, synthetic construct
  REGION 1..117: note = Description of Artificial Sequence: Synthetic polypeptide
EVQLVESGGGLVQPGGSLTLSCAASGSSVNFLSMAWYRQAPGKKRELVAGISADGSTHYIDSVKGRFTISRDNAKNSVYLQMNSLRAEDTAVYYCYAYRWLTRYTYWGQGTLVTVSS

SEQ ID NO: 1637 - protein, 117 aa, synthetic construct
  REGION 1..117: note = Description of Artificial Sequence: Synthetic polypeptide
EVQLVESGGGLVQPGGSLTLSCAASGSSVKFLSMAWYRQAPGKKRELVAGISADGSTDYILSVKGRFTISRDNAKNSVYLQMNSLRAEDTAVYYCYAYEWTTRYTYWGQGTLVTVSS

SEQ ID NO: 1638 - protein, 117 aa, synthetic construct
  REGION 1..117: note = Description of Artificial Sequence: Synthetic polypeptide
EVQLVESGGGLVQPGGSLTLSCAASGSSVSFLSMAWYRQAPGKKRELVAGISADGSTDYIHSVKGRFTISRDNAKNSVYLQMNSLRAEDTAVYYCYAYRWRTRYTYWGQGTLVTVSS

SEQ ID NO: 1639 - protein, 117 aa, synthetic construct
  REGION 1..117: note = Description of Artificial Sequence: Synthetic polypeptide
EVQLVESGGGLVQPGGSLTLSCAASGSSVRFLSMAWYRQAPGKKRELVAGISVDGSTDYIDSVKGRFTISRDNAKNSVYLQMNSLRAEDTAVYYCYAYRWRTRYTYWGQGTLVTVSS

SEQ ID NO: 1640 - protein, 117 aa, synthetic construct
  REGION 1..117: note = Description of Artificial Sequence: Synthetic polypeptide
EVQLVESGGGLVQPGGSLTLSCAASGSSVSFLSVAWYRQAPGKKRELVAGISRDGSTDYIDSVKGRFTISRDNAKNSVYLQMNSLRAEDTAVYYCYAYRWRTRYTYWGQGTLVTVSS

SEQ ID NO: 1641 - protein, 117 aa, synthetic construct
  REGION 1..117: note = Description of Artificial Sequence: Synthetic polypeptide
EVQLVESGGGLVQPGGSLTLSCAASGSQVSFLSMAWYRQAPGKKRELVAGISADGSTVYIDSVKGRFTISRDNAKNSVYLQMNSLRAEDTAVYYCYAYRWSTRYTYWGQGTLVTVSS

SEQ ID NO: 1642 - protein, 117 aa, synthetic construct
  REGION 1..117: note = Description of Artificial Sequence: Synthetic polypeptide
EVQLVESGGGLVQPGGSLTLSCAASGTSVSFLSMAWYRQAPGKKRELVAGISADGSTDYIRSVKGRFTISRDNAKNSVYLQMNSLRAEDTAVYYCYAYRWTTRLTYWGQGTLVTVSS

SEQ ID NO: 1643 - protein, 117 aa, synthetic construct
  REGION 1..117: note = Description of Artificial Sequence: Synthetic polypeptide
EVQLVESGGGLVQPGGSLTLSCAASGSRVSFLSMAWYRQAPGKKRELVAGISADGSTMYIDSVKGRFTISRDNAKNSVYLQMNSLRAEDTAVYYCYAYRWTTRLTYWGQGTLVTVSS

SEQ ID NO: 1644 - protein, 117 aa, synthetic construct
  REGION 1..117: note = Description of Artificial Sequence: Synthetic polypeptide
EVQLVESGGGLVQPGGSLTLSCAASGSSVKFLSMAWYRQAPGKKRELVAGISTDGSTDYIDSVKGRFTISRDNAKNSVYLQMNSLRAEDTAVYYCYAYKWTTRYTYWGQGTLVTVSS

SEQ ID NO: 1645 - protein, 117 aa, synthetic construct
  REGION 1..117: note = Description of Artificial Sequence: Synthetic polypeptide
EVQLVESGGGLVQPGGSLTLSCAASGSSVSFLSSAWYRQAPGKKRELVAGISADGSTLYIDSVKGRFTISRDNAKNSVYLQMNSLRAEDTAVYYCYAYRWTTRSTYWGQGTLVTVSS

SEQ ID NO: 1646 - protein, 117 aa, synthetic construct
  REGION 1..117: note = Description of Artificial Sequence: Synthetic polypeptide
EVQLVESGGGLVQPGGSLTLSCAASGSSVKFLSMAWYRQAPGKKRELVAGISADGSTDYIDSVKGRFTISRDNAKNSVYLQMNSLRAEDTAVYYCYAYRWRTRYTYWGQGTLVTVSS

SEQ ID NO: 1647 - protein, 117 aa, synthetic construct
  REGION 1..117: note = Description of Artificial Sequence: Synthetic polypeptide
EVQLVESGGGLVQPGGSLTLSCAASGSSVSFLSMAWYRQAPGKKRELVAGISATGSTDYIDSVKGRFTISRDNAKNSVYLQMNSLRAEDTAVYYCYAYRWSTRYTYWGQGTLVTVSS

SEQ ID NO: 1648 - protein, 117 aa, synthetic construct
  REGION 1..117: note = Description of Artificial Sequence: Synthetic polypeptide
EVQLVESGGGLVQPGGSLTLSCAASGSTVSFLSMAWYRQAPGKKRELVAGISHDGSTDYIDSVKGRFTISRDNAKNSVYLQMNSLRAEDTAVYYCYAYRWTTRYTYWGQGTLVTVSS

SEQ ID NO: 1649 - protein, 117 aa, synthetic construct
  REGION 1..117: note = Description of Artificial Sequence: Synthetic polypeptide
EVQLVESGGGLVQPGGSLTLSCAASGSSVQFLSMAWYRQAPGKKRELVAGISYDGSTDYIDSVKGRFTISRDNAKNSVYLQMNSLRAEDTAVYYCYAYRWRTRYTYWGQGTLVTVSS

SEQ ID NO: 1650 - protein, 117 aa, synthetic construct
  REGION 1..117: note = Description of Artificial Sequence: Synthetic polypeptide
EVQLVESGGGLVQPGGSLTLSCAASRSSVSFLSMAWYRQAPGKKRELVAGISTDGSTDYIDSVKGRFTISRDNAKNSVYLQMNSLRAEDTAVYYCYAYRWLTRYTYWGQGTLVTVSS

SEQ ID NO: 1651 - protein, 117 aa, synthetic construct
  REGION 1..117: note = Description of Artificial Sequence: Synthetic polypeptide
EVQLVESGGGLVQPGGSLTLSCAASGSKVSFLSMAWYRQAPGKKRELVAGISADGSTAYIDSVKGRFTISRDNAKNSVYLQMNSLRAEDTAVYYCYAYRWRTRYTYWGQGTLVTVSS

SEQ ID NO: 1652 - protein, 117 aa, synthetic construct
  REGION 1..117: note = Description of Artificial Sequence: Synthetic polypeptide
EVQLVESGGGLVQPGGSLTLSCAASGSRVSFLSMAWYRQAPGKKRELVAGISADGSTDYIESVKGRFTISRDNAKNSVYLQMNSLRAEDTAVYYCYAYRWTTRYTYWGQGTLVTVSS

SEQ ID NO: 1653 - protein, 117 aa, synthetic construct
  REGION 1..117: note = Description of Artificial Sequence: Synthetic polypeptide
EVQLVESGGGLVQPGGSLTLSCAASGSSVSFLSMAWYRQAPGKKRELVAGISIDGSTDYIKSVKGRFTISRDNAKNSVYLQMNSLRAEDTAVYYCYAYRWTTRYRYWGQGTLVTVSS

SEQ ID NO: 1654 - protein, 117 aa, synthetic construct
  REGION 1..117: note = Description of Artificial Sequence: Synthetic polypeptide
EVQLVESGGGLVQPGGSLTLSCAASGSKVSFLSMAWYRQAPGKKRELVAGISADGSKDYIDSVKGRFTISRDNAKNSVYLQMNSLRAEDTAVYYCYAYRWTTRYTYWGQGTLVTVSS

SEQ ID NO: 1655 - protein, 117 aa, synthetic construct
  REGION 1..117: note = Description of Artificial Sequence: Synthetic polypeptide
EVQLVESGGGLVQPGGSLTLSCAASGSSVRFLSMAWYRQAPGKKRELVAGISADGSTVYIDSVKGRFTISRDNAKNSVYLQMNSLRAEDTAVYYCYAYRWPTRYTYWGQGTLVTVSS

SEQ ID NO: 1656 - protein, 117 aa, synthetic construct
  REGION 1..117: note = Description of Artificial Sequence: Synthetic polypeptide
EVQLVESGGGLVQPGGSLTLSCAASGSSVKFLSMAWYRQAPGKKRELVAGISRDGSTDYIDSVKGRFTISRDNAKNSVYLQMNSLRAEDTAVYYCYAYRWTTRHTYWGQGTLVTVSS

SEQ ID NO: 1657 - protein, 117 aa, synthetic construct
  REGION 1..117: note = Description of Artificial Sequence: Synthetic polypeptide
EVQLVESGGGLVQPGGSLTLSCAASGSSVKFLSMAWYRQAPGKKRELVAGISADGSTDYIHSVKGRFTISRDNAKNSVYLQMNSLRAEDTAVYYCYAYRWTRRYTYWGQGTLVTVSS

SEQ ID NO: 1658 - protein, 117 aa, synthetic construct
  REGION 1..117: note = Description of Artificial Sequence: Synthetic polypeptide
EVQLVESGGGLVQPGGSLTLSCAASGSSVSILSMAWYRQAPGKKRELVAGISADGSTIYIDSVKGRFTISRDNAKNSVYLQMNSLRAEDTAVYYCYAYRWHTRYTYWGQGTLVTVSS

SEQ ID NO: 1659 - protein, 117 aa, synthetic construct
  REGION 1..117: note = Description of Artificial Sequence: Synthetic polypeptide
EVQLVESGGGLVQPGGSLTLSCAASGSSVSFLSVAWYRQAPGKKRELVAGISANGSTDYIDSVKGRFTISRDNAKNSVYLQMNSLRAEDTAVYYCYAYRWTNRYTYWGQGTLVTVSS

SEQ ID NO: 1660 - protein, 117 aa, synthetic construct
  REGION 1..117: note = Description of Artificial Sequence: Synthetic polypeptide
EVQLVESGGGLVQPGGSLTLSCAASGSSVRFLSMAWYRQAPGKKRELVAGISTDGSTDYIDSVKGRFTISRDNAKNSVYLQMNSLRAEDTAVYYCYAYRWTTRYRYWGQGTLVTVSS

SEQ ID NO: 1661 - protein, 117 aa, synthetic construct
  REGION 1..117: note = Description of Artificial Sequence: Synthetic polypeptide
EVQLVESGGGLVQPGGSLTLSCAASGSRVSFLSMAWYRQAPGKKRELVAGISYDGSTDYIDSVKGRFTISRDNAKNSVYLQMNSLRAEDTAVYYCYAYRWTTRRTYWGQGTLVTVSS

SEQ ID NO: 1662 - protein, 117 aa, synthetic construct
  REGION 1..117: note = Description of Artificial Sequence: Synthetic polypeptide
EVQLVESGGGLVQPGGSLTLSCAASGHSVSFLSMAWYRQAPGKKRELVAGISADGSTDYIASVKGRFTISRDNAKNSVYLQMNSLRAEDTAVYYCYAYRWSTRYTYWGQGTLVTVSS

SEQ ID NO: 1663 - protein, 117 aa, synthetic construct
  REGION 1..117: note = Description of Artificial Sequence: Synthetic polypeptide
EVQLVESGGGLVQPGGSLTLSCAASGSSVRFLSMAWYRQAPGKKRELVAGISADGSTDYIGSVKGRFTISRDNAKNSVYLQMNSLRAEDTAVYYCYAYRWSTRYTYWGQGTLVTVSS

SEQ ID NO: 1664 - protein, 117 aa, synthetic construct
  REGION 1..117: note = Description of Artificial Sequence: Synthetic polypeptide
EVQLVESGGGLVQPGGSLTLSCAASGSSVSFLSMAWYRQAPGKKRELVAGISANGSTDYYDSVKGRFTISRDNAKNSVYLQMNSLRAEDTAVYYCYAYRWRTRYTYWGQGTLVTVSS

SEQ ID NO: 1665 - protein, 117 aa, synthetic construct
  REGION 1..117: note = Description of Artificial Sequence: Synthetic polypeptide
EVQLVESGGGLVQPGGSLTLSCAASGSRVSFLSMAWYRQAPGKKRELVAGISADGSTSYIDSVKGRFTISRDNAKNSVYLQMNSLRAEDTAVYYCYAYRWTTRYTYWGQGTLVTVSS

SEQ ID NO: 1666 - protein, 117 aa, synthetic construct
  REGION 1..117: note = Description of Artificial Sequence: Synthetic polypeptide
EVQLVESGGGLVQPGGSLTLSCAASGSSVKFLSMAWYRQAPGKKRELVAGVSADGSTDYIDSVKGRFTISRDNAKNSVYLQMNSLRAEDTAVYYCYAYEWTTRYTYWGQGTLVTVSS

SEQ ID NO: 1667 - protein, 117 aa, synthetic construct
  REGION 1..117: note = Description of Artificial Sequence: Synthetic polypeptide
EVQLVESGGGLVQPGGSLTLSCAASGSSVSRLSMAWYRQAPGKKRELVAGISARGSTDYIDSVKGRFTISRDNAKNSVYLQMNSLRAEDTAVYYCYAYRWTTRSTYWGQGTLVTVSS

SEQ ID NO: 1668 - protein, 117 aa, synthetic construct
  REGION 1..117: note = Description of Artificial Sequence: Synthetic polypeptide
EVQLVESGGGLVQPGGSLTLSCAASGRSVSFLSMAWYRQAPGKKRELVAGISADGSTIYIDSVKGRFTISRDNAKNSVYLQMNSLRAEDTAVYYCYAYRWTTRYTYWGQGTLVTVSS

SEQ ID NO: 1669 - protein, 117 aa, synthetic construct
  REGION 1..117: note = Description of Artificial Sequence: Synthetic polypeptide
EVQLVESGGGLVQPGGSLTLSCAASGRSVSFLSMAWYRQAPGKKRELVAGISANGSTDYIDSVKGRFTISRDNAKNSVYLQMNSLRAEDTAVYYCYAYRWSTRYTYWGQGTLVTVSS

SEQ ID NO: 1670 - protein, 117 aa, synthetic construct
  REGION 1..117: note = Description of Artificial Sequence: Synthetic polypeptide
EVQLVESGGGLVQPGGSLTLSCAASGSSVKFLSMAWYRQAPGKKRELVAGISADGSTDYVDSVKGRFTISRDNAKNSVYLQMNSLRAEDTAVYYCYAYRWSTRYTYWGQGTLVTVSS

SEQ ID NO: 1671 - protein, 117 aa, synthetic construct
  REGION 1..117: note = Description of Artificial Sequence: Synthetic polypeptide
EVQLVESGGGLVQPGGSLTLSCAASGSSVSKLSMAWYRQAPGKKRELVAGISADGSTDYRDSVKGRFTISRDNAKNSVYLQMNSLRAEDTAVYYCYAYRWTYRYTYWGQGTLVTVSS

SEQ ID NO: 1672 - protein, 117 aa, synthetic construct
  REGION 1..117: note = Description of Artificial Sequence: Synthetic polypeptide
EVQLVESGGGLVQPGGSLTLSCAASGSSVSRLSMAWYRQAPGKKRELVAGISVDGSTDYIDSVKGRFTISRDNAKNSVYLQMNSLRAEDTAVYYCYAYRWTTRLTYWGQGTLVTVSS

SEQ ID NO: 1673 - protein, 117 aa, synthetic construct
  REGION 1..117: note = Description of Artificial Sequence: Synthetic polypeptide
EVQLVESGGGLVQPGGSLTLSCAASGSSVKFLSLAWYRQAPGKKRELVAGISADGSTDYILSVKGRFTISRDNAKNSVYLQMNSLRAEDTAVYYCYAYEWTTRYTYWGQGTLVTVSS

SEQ ID NO: 1674 - protein, 117 aa, synthetic construct
  REGION 1..117: note = Description of Artificial Sequence: Synthetic polypeptide
EVQLVESGGGLVQPGGSLTLSCAASGSSVSRLSLAWYRQAPGKKRELVAGISVDGSTDYIDSVKGRFTISRDNAKNSVYLQMNSLRAEDTAVYYCYAYRWTTRLTYWGQGTLVTVSS

SEQ ID NO: 1675 - protein, 119 aa, synthetic construct
  REGION 1..119: note = Description of Artificial Sequence: Synthetic polypeptide
EVQLVESGGGLVQPGGSLTLSCVASGTSSSINAMGWYRRAPGKQRELVAGISSDGSKVFNESVKGRFTISRDNAKNSVYLQMNSLRAEDTAVYYCYYFRPAAGSPMRYWGQGTLVTVSS

SEQ ID NO: 1676 - protein, 119 aa, synthetic construct
  REGION 1..119: note = Description of Artificial Sequence: Synthetic polypeptide
EVQLVESGGGLVQPGGSLTLSCVASGTTSSINAIGWYRRAPGKQRELVAGISSDGSEVYTDSVKGRFTISRDNAKNSVYLQMNSLRAEDTAVYYCYYFRTVDGSPLRYWGQGTLVTVSS

SEQ ID NO: 1677 - protein, 119 aa, synthetic construct
  REGION 1..119: note = Description of Artificial Sequence: Synthetic polypeptide
EVQLVESGGGLVQPGGSLTLSCVASGSTSSINAMAWYRRAPGKQRELVAGISSDDSNVYYESVKGRFTISRDNAKNSVYLQMNSLRAEDTAVYYCYYFRTVSGSSKRYWGQGTLVTVSS

SEQ ID NO: 1678 - protein, 119 aa, synthetic construct
  REGION 1..119: note = Description of Artificial Sequence: Synthetic polypeptide
EVQLVESGGGLVQPGGSLTLSCVASGQTYRVNAFGWYRRAPGKQRELVAGISSDGSKVYADSVKGRFTISRDNAKNSVYLQMNSLRAEDTAVYYCYYFSAGSGTEMSYWGQGTLVTVSS

SEQ ID NO: 1679 - protein, 119 aa, synthetic construct
  REGION 1..119: note = Description of Artificial Sequence: Synthetic polypeptide
EVQLVESGGGLVQPGGSLTLSCVASGSTSSINAMAWYRRAPGKQRELVAGISSDESTLYVDSVKGRFTISRDNAKNSVYLQMNSLRAEDTAVYYCYYFGSLSGSSTTYWGQGTLVTVSS

SEQ ID NO: 1680 - protein, 119 aa, synthetic construct
  REGION 1..119: note = Description of Artificial Sequence: Synthetic polypeptide
EVQLVESGGGLVQPGGSLTLSCVASGSASLTNATGWYRRAPGKQRELVAGISSDDSKVYSDSVKGRFTISRDNAKNSVYLQMNSLRAEDTAVYYCYYFGSVSGSWTRYWGQGTLVTVSS

SEQ ID NO: 1681 - protein, 119 aa, synthetic construct
  REGION 1..119: note = Description of Artificial Sequence: Synthetic polypeptide
EVQLVESGGGLVQPGGSLTLSCVASGYPSLNNAMGWYRRAPGKQRELVAGISSDGSQVYGASVKGRFTISRDNAKNSVYLQMNSLRAEDTAVYYCYYFRLVSGSSMSYWGQGTLVTVSS

SEQ ID NO: 1682 - protein, 119 aa, synthetic construct
  REGION 1..119: note = Description of Artificial Sequence: Synthetic polypeptide
EVQLVESGGGLVQPGGSLTLSCVASGSSSTINAIGWYRRAPGKQRELVAGISSDGSKVYADSVKGRFTISRDNAKNSVYLQMNSLRAEDTAVYYCYYFRTGSGTSKSYWGQGTLVTVSS

SEQ ID NO: 1683 - protein, 119 aa, synthetic construct
  REGION 1..119: note = Description of Artificial Sequence: Synthetic polypeptide
EVQLVESGGGLVQPGGSLTLSCVASGSTSYINAMGWYRRAPGKQRELVAGISSDGSNMYADSVKGRFTISRDNAKNSVYLQMNSLRAEDTAVYYCYYFSNMSGTTRRYWGQGTLVTVSS

SEQ ID NO: 1684 - protein, 119 aa, synthetic construct
  REGION 1..119: note = Description of Artificial Sequence: Synthetic polypeptide
EVQLVESGGGLVQPGGSLTLSCVASGSTSSVNALGWYRRAPGKQRELVAGISSDGSKVYTDSVKGRFTISRDNAKNSVYLQMNSLRAEDTAVYYCYYFRTVPGSAMGYWGQGTLVTVSS

SEQ ID NO: 1685 - protein, 119 aa, synthetic construct
  REGION 1..119: note = Description of Artificial Sequence: Synthetic polypeptide
EVQLVESGGGLVQPGGSLTLSCVASGSTSLSNAVGWYRRAPGKQRELVAGISSDGSKVSAESVKGRFTISRDNAKNSVYLQMNSLRAEDTAVYYCYYFRAESGSSMGYWGQGTLVTVSS

SEQ ID NO: 1686 - protein, 119 aa, synthetic construct
  REGION 1..119: note = Description of Artificial Sequence: Synthetic polypeptide
EVQLVESGGGLVQPGGSLTLSCVASGSTSSTNAIGWYRRAPGKQRELVAGISSDGSKVYDDSVKGRFTISRDNAKNSVYLQMNSLRAEDTAVYYCYYFRTLYGSSRSYWGQGTLVTVSS

SEQ ID NO: 1687 - protein, 119 aa, synthetic construct
  REGION 1..119: note = Description of Artificial Sequence: Synthetic polypeptide
EVQLVESGGGLVQPGGSLTLSCVASGLTSTINAMGWYRRAPGKQRELVAGISSDGSKVYDDSVKGRFTISRDNAKNSVYLQMNSLRAEDTAVYYCYYFSPFSGSDTGYWGQGTLVTVSS

SEQ ID NO: 1688 - protein, 119 aa, synthetic construct
  REGION 1..119: note = Description of Artificial Sequence: Synthetic polypeptide
EVQLVESGGGLVQPGGSLTLSCVASGVSPSKNAIGWYRRAPGKQRELVAGISSDGSAVYVGSVKGRFTISRDNAKNSVYLQMNSLRAEDTAVYYCYYFSTFSGSSISYWGQGTLVTVSS

SEQ ID NO: 1689 - protein, 119 aa, synthetic construct
  REGION 1..119: note = Description of Artificial Sequence: Synthetic polypeptide
EVQLVESGGGLVQPGGSLTLSCVASGSTSSINAVGWYRRAPGKQRELVAGISSDGSYVYSESVKGRFTISRDNAKNSVYLQMNSLRAEDTAVYYCYYFRTLAGSEMRYWGQGTLVTVSS

SEQ ID NO: 1690 - protein, 119 aa, synthetic construct
  REGION 1..119: note = Description of Artificial Sequence: Synthetic polypeptide
EVQLVESGGGLVQPGGSLTLSCVASGSTTMNNAMAWYRRAPGKQRELVAGISSDSSHVYADSVKGRFTISRDNAKNSVYLQMNSLRAEDTAVYYCYYFRTVSGSGVRYWGQGTLVTVSS

SEQ ID NO: 1691 - protein, 119 aa, synthetic construct
  REGION 1..119: note = Description of Artificial Sequence: Synthetic polypeptide
EVQLVESGGGLVQPGGSLTLSCVASGSTSKINAIGWYRRAPGKQRELVAGISSDSSIVYTDSVKGRFTISRDNAKNSVYLQMNSLRAEDTAVYYCYYFRPGAGHSNSYWGQGTLVTVSS

SEQ ID NO: 1692 - protein, 119 aa, synthetic construct
  REGION 1..119: note = Description of Artificial Sequence: Synthetic polypeptide
EVQLVESGGGLVQPGGSLTLSCVASGQTTALNAMGWYRRAPGKQRELVAGISSDGSEVNTDSVKGRFTISRDNAKNSVYLQMNSLRAEDTAVYYCYYFRRASGTAMSYWGQGTLVTVSS

SEQ ID NO: 1693 - protein, 119 aa, synthetic construct
  REGION 1..119: note = Description of Artificial Sequence: Synthetic polypeptide
EVQLVESGGGLVQPGGSLTLSCVASGATSSINAIGWYRRAPGKQRELVAGISSDGSKLSSDSVKGRFTISRDNAKNSVYLQMNSLRAEDTAVYYCYYFTSASGTDLSYWGQGTLVTVSS

SEQ ID NO: 1694 - protein, 119 aa, synthetic construct
  REGION 1..119: note = Description of Artificial Sequence: Synthetic polypeptide
EVQLVESGGGLVQPGGSLTLSCVASGSTSTINAMGWYRRAPGKQRELVAGISSDNSKVYADSVKGRFTISRDNAKNSVYLQMNSLRAEDTAVYYCYYFRSANGSSKRYWGQGTLVTVSS

SEQ ID NO: 1695 - protein, 119 aa, synthetic construct
  REGION 1..119: note = Description of Artificial Sequence: Synthetic polypeptide
EVQLVESGGGLVQPGGSLTLSCVASGSTSSINAMGWYRRAPGKQRELVAGISSDGSRVYFDSVKGRFTISRDNAKNSVYLQMNSLRAEDTAVYYCYYFKTIAGAGMRYWGQGTLVTVSS

SEQ ID NO: 1696 - protein, 119 aa, synthetic construct
  REGION 1..119: note = Description of Artificial Sequence: Synthetic polypeptide
EVQLVESGGGLVQPGGSLTLSCVASGSTSLVNAMGWYRRAPGKQRELVAGISSDGSLVYAESVKGRFTISRDNAKNSVYLQMNSLRAEDTAVYYCYYFRYGSGSSLSYWGQGTLVTVSS

SEQ ID NO: 1697 - protein, 119 aa, synthetic construct
  REGION 1..119: note = Description of Artificial Sequence: Synthetic polypeptide
EVQLVESGGGLVQPGGSLTLSCVASGSTSLNNAIGWYRRAPGKQRELVAGISSDGSVVYVDSVKGRFTISRDNAKNSVYLQMNSLRAEDTAVYYCYYFRTVPGASMKYWGQGTLVTVSS

SEQ ID NO: 1698 - protein, 119 aa, synthetic construct
  REGION 1..119: note = Description of Artificial Sequence: Synthetic polypeptide
EVQLVESGGGLVQPGGSLTLSCVASGSTSPVNAMAWYRRAPGKQRELVAGISSDGSKVYVDSVKGRFTISRDNAKNSVYLQMNSLRAEDTAVYYCYYFRTVDGSAISYWGQGTLVTVSS

SEQ ID NO: 1699 - protein, 119 aa, synthetic construct
  REGION 1..119: note = Description of Artificial Sequence: Synthetic polypeptide
EVQLVESGGGLVQPGGSLTLSCVASGTTSSMNAIGWYRRAPGKQRELVAGISSDGSKLYDESVKGRFTISRDNAKNSVYLQMNSLRAEDTAVYYCYYFRTVKGSGGSYWGQGTLVTVSS

SEQ ID NO: 1700 - protein, 119 aa, synthetic construct
  REGION 1..119: note = Description of Artificial Sequence: Synthetic polypeptide
EVQLVESGGGLVQPGGSLTLSCVASGETSSINAMAWYRRAPGKQRELVAGISSDYSKLYADSVKGRFTISRDNAKNSVYLQMNSLRAEDTAVYYCYYFRTVSGSSRGYWGQGTLVTVSS

SEQ ID NO: 1701 - protein, 119 aa, synthetic construct
  REGION 1..119: note = Description of Artificial Sequence: Synthetic polypeptide
EVQLVESGGGLVQPGGSLTLSCVASGSTSTINAIGWYRRAPGKQRELVAGISSDSSKVYTESVKGRFTISRDNAKNSVYLQMNSLRAEDTAVYYCYYFRPGPGSQMAYWGQGTLVTVSS

SEQ ID NO: 1702 - protein, 119 aa, synthetic construct
  REGION 1..119: note = Description of Artificial Sequence: Synthetic polypeptide
EVQLVESGGGLVQPGGSLTLSCVASGSTYSMNAMGWYRRAPGKQRELVAGISSDGSQVYVDSVKGRFTISRDNAKNSVYLQMNSLRAEDTAVYYCYYFRTVAGSASGYWGQGTLVTVSS

SEQ ID NO: 1703 - protein, 119 aa, synthetic construct; identical to SEQ ID NO: 1534
  REGION 1..119: note = Description of Artificial Sequence: Synthetic polypeptide

SEQ ID NO: 1704 - protein, 119 aa, synthetic construct
  REGION 1..119: note = Description of Artificial Sequence: Synthetic polypeptide
EVQLVESGGGLVQPGGSLTLSCVASGSTSTINAIGWYRRAPGKQRELVAGISSDGSKVYVDSVKGRFTISRDNAKNSVYLQMNSLRAEDTAVYYCYYFINLKGSSMAYWGQGTLVTVSS

SEQ ID NO: 1705 - protein, 119 aa, synthetic construct
  REGION 1..119: note = Description of Artificial Sequence: Synthetic polypeptide
EVQLVESGGGLVQPGGSLTLSCVASGSTSSINAIGWYRRAPGKQRELVAGISSDGSKVYADSVKGRFTISRDNAKNSVYLQMNSLRAEDTAVYYCYYFRMVTGSYGGYWGQGTLVTVSS

SEQ ID NO: 1706 - protein, 119 aa, synthetic construct
  REGION 1..119: note = Description of Artificial Sequence: Synthetic polypeptide
EVQLVESGGGLVQPGGSLTLSCVASGSISSINAMGWYRRAPGKQRELVAGISSDGSSVYADSVKGRFTISRDNAKNSVYLQMNSLRAEDTAVYYCYYFKSSYGLPMRYWGQGTLVTVSS

SEQ ID NO: 1707 - protein, 119 aa, synthetic construct
  REGION 1..119: note = Description of Artificial Sequence: Synthetic polypeptide
EVQLVESGGGLVQPGGSLTLSCVASGSTQVNNAMAWYRRAPGKQRELVAGISSDGSQVYYGSVKGRFTISRDNAKNSVYLQMNSLRAEDTAVYYCYYFKTVSGQSLRYWGQGTLVTVSS

SEQ ID NO: 1708 - protein, 119 aa, synthetic construct
  REGION 1..119: note = Description of Artificial Sequence: Synthetic polypeptide
EVQLVESGGGLVQPGGSLTLSCVASGSTASFNAMAWYRRAPGKQRELVAGISSDGSKVYTDSVKGRFTISRDNAKNSVYLQMNSLRAEDTAVYYCYYFRTVTGRAARYWGQGTLVTVSS

SEQ ID NO: 1709 - protein, 119 aa, synthetic construct
  REGION 1..119: note = Description of Artificial Sequence: Synthetic polypeptide
EVQLVESGGGLVQPGGSLTLSCVASGSPLSINAIGWYRRAPGKQRELVAGISSDGSKVSADSVKGRFTISRDNAKNSVYLQMNSLRAEDTAVYYCYYFGPAIGASRTYWGQGTLVTVSS

SEQ ID NO: 1710 - protein, 119 aa, synthetic construct
  REGION 1..119: note = Description of Artificial Sequence: Synthetic polypeptide
EVQLVESGGGLVQPGGSLTLSCVASGSTTFINAIGWYRRAPGKQRELVAGISSDGSKVYEDSVKGRFTISRDNAKNSVYLQMNSLRAEDTAVYYCYYFRTVSGAPKSYWGQGTLVTVSS

SEQ ID NO: 1711 - protein, 119 aa, synthetic construct
  REGION 1..119: note = Description of Artificial Sequence: Synthetic polypeptide
EVQLVESGGGLVQPGGSLTLSCVASGSTSSINAIGWYRRAPGKQRELVAGISSDRSKVYADSVKGRFTISRDNAKNSVYLQMNSLRAEDTAVYYCYYFHTVSGSSMSYWGQGTLVTVSS

SEQ ID NO: 1712 - protein, 119 aa, synthetic construct
  REGION 1..119: note = Description of Artificial Sequence: Synthetic polypeptide
EVQLVESGGGLVQPGGSLTLSCVASGETDTINAVGWYRRAPGKQRELVAGISSDGSKVYAESVKGRFTISRDNAKNSVYLQMNSLRAEDTAVYYCYYFRRLEGYSNRYWGQGTLVTVSS

SEQ ID NO: 1713 - protein, 119 aa, synthetic construct
  REGION 1..119: note = Description of Artificial Sequence: Synthetic polypeptide
EVQLVESGGGLVQPGGSLTLSCVASGSTSPINAIGWYRRAPGKQRELVAGISSDGSVVTTESVKGRFTISRDNAKNSVYLQMNSLRAEDTAVYYCYYFRTGSGSSMGYWGQGTLVTVSS

SEQ ID NO: 1714 - protein, 119 aa, synthetic construct
  REGION 1..119: note = Description of Artificial Sequence: Synthetic polypeptide
EVQLVESGGGLVQPGGSLTLSCVASGSITSSNAMGWYRRAPGKQRELVAGISSDGSHVHQESVKGRFTISRDNAKNSVYLQMNSLRAEDTAVYYCYYFTTVTGSSMSYWGQGTLVTVSS

SEQ ID NO: 1715 - protein, 117 aa, synthetic construct
  REGION 1..117: note = Description of Artificial Sequence: Synthetic polypeptide
EVQLVESGGGLVQPGGSLTLSCAASRYSVSNLSMAWYRQAPGKKRELVAGISADGSTVYVESVKGRFTISRDNAKNSVYLQMNSLRAEDTAVYYCYAYYWTERRPYWGQGTLVTVSS

SEQ ID NO: 1716 - protein, 117 aa, synthetic construct
  REGION 1..117: note = Description of Artificial Sequence: Synthetic polypeptide
EVQLVESGGGLVQPGDSLTLSCAASMSTVSVLSMAWYRQAPGKKRELVAGISSDGSTVYIDSVKGRFTISRDNAKNSVYLQMNSLRAEDTAIYYCYAYSWDDAHPYWGQGTLVTVSS

SEQ ID NO: 1717 - protein, 117 aa, synthetic construct
  REGION 1..117: note = Description of Artificial Sequence: Synthetic polypeptide
EVQLVESGGGLVQPGGSLTLSCAASDSYVSLLSMAWYRQAPGKKRELVAGISVDGSTHYVASVKGRFTISRDNAKNSVYLQMNSLRAEDTAVYYCYAYRWMTRLTYWGQGTLVTVSS

SEQ ID NO: 1718 - protein, 117 aa, synthetic construct
  REGION 1..117: note = Description of Artificial Sequence: Synthetic polypeptide
EVQLVESGGGLVQPGGSLTLSCAASDSAVSVLSIAWYRQAPGKKRELVAGISTDGSKHYIDSVKGRFTISRDNAKNSVYLQMNSLRAEDTAVYYCYAYDWADAQPYWGQGTLVTVSS

SEQ ID NO: 1719 - protein, 117 aa, synthetic construct
  REGION 1..117: note = Description of Artificial Sequence: Synthetic polypeptide
EVQLVESGGGLVQPGGSLTLSCAASHSSVTSLSLAWYRQAPGKKRELVAGISYDGSKYYAESVKGRFTISRDNAKNSVYLQMNSLRAEDTAVYYCYAYSWTDRLPYWGQGTLVTVSS

SEQ ID NO: 1720 - protein, 117 aa, synthetic construct
  REGION 1..117: note = Description of Artificial Sequence: Synthetic polypeptide
EVQLVESGGGLVQPGGSLTLSCAASDSVVKFLSMAWYRQAPGKKRELVAGISANGSRTYMESVKGRFTISRDNAKNSVYLQMNSLRAEDTAVYYCYAYRWATRLPYWGQGTLVTVSS

SEQ ID NO: 1721 - protein, 117 aa, synthetic construct
  REGION 1..117: note = Description of Artificial Sequence: Synthetic polypeptide
EVQLVESGGGLVQPGGSLTLSCAASDPSVWNLSMAWYRQAPGKKRELVAGISPDGSTDYVDSVKGRFTISRDNAKNSVYLQMNSLRAEDTAVYYCYAYKWSNRLPYWGQGTLVTVSS

SEQ ID NO: 1722 - protein, 117 aa, synthetic construct
  REGION 1..117: note = Description of Artificial Sequence: Synthetic polypeptide
EVQLVESGGGLVQPGGSLTLSCAASGTSVMLLSLAWYRQAPGKKRELVAGISPNGSAVYTESVKGRFTISRDNAKNSVYLQMNSLRAEDTAVYYCYAYGWKTRQPYWGQGTLVTVSS

SEQ ID NO: 1723 - protein, 117 aa, synthetic construct
  REGION 1..117: note = Description of Artificial Sequence: Synthetic polypeptide
EVQLVESGGGLVQPGGSLTLSCAASSSPVSNLSLAWYRQAPGKKRELVAGISPDGSTAYMESVKGRFTISRDNAKNSVYLQMNSLRAEDTAVYYCYAYRWPNRRGYWGQGTLVTVSS

SEQ ID NO: 1724 - protein, 117 aa, synthetic construct
  REGION 1..117: note = Description of Artificial Sequence: Synthetic polypeptide
EVQLVESGGGLVQPGGSLTLSCAASWRSVLLLSVAWYRQAPGKKRELVAGISNDGSTDYIDSVKGRFTISRDNAKNSVYLQMNSLRAEDTAVYYCYAYDWTTRQRYWGQGTLVTVSS

SEQ ID NO: 1725 - protein, 117 aa, synthetic construct
  REGION 1..117: note = Description of Artificial Sequence: Synthetic polypeptide
EVQLVESGGGLVQPGGSLTLSCAASSSSVQYLSMAWYRQAPGKKRELVAGISTDGSAVYFDSVKGRFTISRDNAKNSVYLQMNSLRAEDTAVYYCYAYNWSYAQPYWGQGTLVTVSS

SEQ ID NO: 1726 - protein, 117 aa, synthetic construct
  REGION 1..117: note = Description of Artificial Sequence: Synthetic polypeptide
EVQLVESGGGLVQPGGSLTLSCAASGTSVSLLSLAWYRQAPGKKRELVAGISTGGSTHYIESVKGRFTISRDNAKNSVYLQMNSLRAEDTAVYYCYAYNWTDSLQYWGQGTLVTVSS

SEQ ID NO: 1727 - protein, 117 aa, synthetic construct
  REGION 1..117: note = Description of Artificial Sequence: Synthetic polypeptide
EVQLVESGGGLVQPGGSLTLSCAASLSSVSNLSIAWYRQAPGKKRELVAGISTDGSTVYIDSVKGRFTISRDNAKNSVYLQMNSLRAEDTAVYYCYAYSWTTSLPYWGQGTLVTVSS

SEQ ID NO: 1728 - protein, 117 aa, synthetic construct
  REGION 1..117: note = Description of Artificial Sequence: Synthetic polypeptide
EVQLVESGGGLVQPGGSLTLSCAASMYSVSFLSMAWYRQAPGKKRELVAGISNEGSTYYMDSVKGRFTISRDNAKNSVYLQMNSLRAEDTAVYYCYAYKWRSRSTYWGQGTLVTVSS

SEQ ID NO: 1729 - protein, 117 aa, synthetic construct
  REGION 1..117: note = Description of Artificial Sequence: Synthetic polypeptide
EVQLVESGGGLVQPGGSLTLSCAASKSSVSHLSLAWYRQAPGKKRELVAGISADGSHVYTNSVKGRFTISRDNAKNSVYLQMNSLRAEDTAVYYCYAYSQTTRDPYWGQGTLVTVSS

SEQ ID NO: 1730 - protein, 117 aa, synthetic construct
  REGION 1..117: note = Description of Artificial Sequence: Synthetic polypeptide
EVQLVESGGGLVQPGGSLTLSCAASYTSVLDLSIAWYRQAPGKKRELVAGISDDGSRYYTDSVKGRFTISRDNAKNSVYLQMNSLRAEDTAVYYCYAYRWTARDTYWGQGTLVTVSS

SEQ ID NO: 1731 - protein, 117 aa, synthetic construct
  REGION 1..117: note = Description of Artificial Sequence: Synthetic polypeptide
EVQLVESGGGLVQPGGSLTLSCAASMSDVSFLSMAWYRQAPGKKRELVAGISAEGSTLYMESVKGRFTISRDNAKNSVYLQMNSLRAEDTAVYYCYAYRWTSRLSYWGQGTLVTVSS

SEQ ID NO: 1732 - protein, 117 aa, synthetic construct
  REGION 1..117: note = Description of Artificial Sequence: Synthetic polypeptide
EVQLVESGGGLVQPGGSLTLSCAASESSVSFLSSAWYRQAPGKKRELVAGISTDGSTVYIDSVKGRFTISRDNAKNSVYLQMNSLRAEDTAVYYCYAYSWTTRSRYWGQGTLVTVSS

SEQ ID NO: 1733 - protein, 117 aa, synthetic construct
  REGION 1..117: note = Description of Artificial Sequence: Synthetic polypeptide
EVQLVESGGGLVQPGGSLTLSCAASGDSVSLLSMAWYRQAPGKKRELVAGISANGSTSYIDSVKGRFTISRDNAKNSVYLQMNSLRAEDTAVYYCYAYNWTSRYRYWGQGTLVTVSS

SEQ ID NO: 1734 - protein, 117 aa, synthetic construct
  REGION 1..117: note = Description of Artificial Sequence: Synthetic polypeptide
EVQLVESGGGLVQPGGSLTLSCAASGSDVWYLSLAWYRQAPGKKRELVAGISDDGSRHYIESVKGRFTISRDNAKNSVYLQMNSLRAEDTAVYYCYAYSWKTRFPYWGQGTLVTVSS

SEQ ID NO: 1735 - protein, 117 aa, synthetic construct
  REGION 1..117: note = Description of Artificial Sequence: Synthetic polypeptide
EVQLVESGGGLVQPGGSLTLSCAASKSAVAFLSIAWYRQAPGKKRELVAGISPDGSTVYIESVKGRFTISRDNAKNSVYLQMNSLRAEDTAVYYCYAYSWTTRYPYWGQGTLVTVSS

SEQ ID NO: 1736 - protein, 117 aa, synthetic construct
  REGION 1..117: note = Description of Artificial Sequence: Synthetic polypeptide
EVQLVESGGGLVQPGGSLTLSCAASFSAVAYLSMAWYRQAPGKKRELVAGISDDGSTVYVDSVKGRFTISRDNAKNSVYLQMNSLRAEDTAVYYCYAYEWTNALPYWGQGTLVTVSS

SEQ ID NO: 1737 - protein, 117 aa, synthetic construct
  REGION 1..117: note = Description of Artificial Sequence: Synthetic polypeptide
EVQLVESGGGLVQPGGSLTLSCAASVYSVYDLSTAWYRQAPGKKRELVAGISDDGSTVYFDSVKGRFTISRDNAKNSVYLQMNSLRAEDTAVYYCYAYSWITRSPYWGQGTLVTVSS

SEQ ID NO: 1738 - protein, 117 aa, synthetic construct
  REGION 1..117: note = Description of Artificial Sequence: Synthetic polypeptide
EVQLVESGGGLVQPGGSLTLSCAASGDSVSFLSMAWYRQAPGKKRELVAGISDEGSTVYIGSVKGRFTISRDNAKNSVYLQMNSLRAEDTAVYYCYAYSWTTRRQYWGQGTLVTVSS

SEQ ID NO: 1739 - protein, 117 aa, synthetic construct
  REGION 1..117: note = Description of Artificial Sequence: Synthetic polypeptide
EVQLVESGGGLVQPGGSLTLSCAASSSSVSLLSLAWYRQAPGKKRELVAGISDDGSIVYMDSVKGRFTISRDNAKNSVYLQMNSLRAEDTAVYYCYAYSWITRSPYWGQGTLVTVSS

SEQ ID NO: 1740 - protein, 117 aa, synthetic construct
  REGION 1..117: note = Description of Artificial Sequence: Synthetic polypeptide
EVQLVESGGGLVQPGGSLTLSCAASADSVSFLSIAWYRQAPGKKRELVAGISDDGSKHYFDSVKGRFTISRDNAKNSVYLQMNSLRAEDTAVYYCYAYRWEESRQYWGQGTLVTVSS

SEQ ID NO: 1741 - protein, 117 aa, synthetic construct
  REGION 1..117: note = Description of Artificial Sequence: Synthetic polypeptide
EVQLVESGGGLVQPGGSLTLSCAASASSVTLLSIAWYRQAPGKKRELVAGISTDGSTDYLHSVKGRFTISRDNAKNSVYLQMNSLRAEDTAVYYCYAYTWTTRLPYWGQGTLVTVTS

SEQ ID NO: 1742 - protein, 117 aa, synthetic construct; identical to SEQ ID NO: 1740
  REGION 1..117: note = Description of Artificial Sequence: Synthetic polypeptide

SEQ ID NO: 1743 - protein, 117 aa, synthetic construct
  REGION 1..117: note = Description of Artificial Sequence: Synthetic polypeptide
EVQLVESGGGLVQPGGSLTLSCAASGTSVWLLSMAWYRQAPGKKRELVAGISYDGSTVYVESVKGRFTISRDNAKNSVYLQMNSLRAEDTAVYYCYAYSWTTRQPYWGQGTLVTVSS

SEQ ID NO: 1744 - protein, 117 aa, synthetic construct
  REGION 1..117: note = Description of Artificial Sequence: Synthetic polypeptide
EVQLVESGGGLVQPGGSLTLSCAASGSSVSILSIAWYRQAPGKKRELVAGISDDGSTVYIDSVKGRFTISRDNAKNSVYLQMNSLRAEDTAVYYCYAYVWGTRLPYWGQGTLVTVSS

SEQ ID NO: 1745 - protein, 117 aa, synthetic construct
  REGION 1..117: note = Description of Artificial Sequence: Synthetic polypeptide
EVQLVESGGGLVQPGGSLTLSCAASGTAVSNLSIAWYRQAPGKKRELVAGISDDGSTVYVDSVKGRFTISRDNAKNSVYLQMNSLRAEDTAVYYCYAYEWTNALPYWGQGTLVTVSS

SEQ ID NO: 1746 - protein, 117 aa, synthetic construct
  REGION 1..117: note = Description of Artificial Sequence: Synthetic polypeptide
EVQLVESGGGLVQPGGSLTLSCAASGSAVSMLSLAWYRQAPGKKRELVAGISDDGSQVYIDSVKGRFTISRDNAKNSVYLQMNSLRAEDTAVYYCYAYRWEDALTYWGQGTLVTVSS

SEQ ID NO: 1747 - protein, 117 aa, synthetic construct
  REGION 1..117: note = Description of Artificial Sequence: Synthetic polypeptide
EVQLVESGGGLVQPGGSLTLSCAASGMTVFFLSMAWYRQAPGKKRELVAGISVDGSTVYSDSVKGRFTISRDNAKNSVYLQMNSLRAEDTAVYYCYAYSWTTRYPYWGQGTLVTVSS

SEQ ID NO: 1748 - protein, 117 aa, synthetic construct
  REGION 1..117: note = Description of Artificial Sequence: Synthetic polypeptide
EVQLVESGGGLVQPGGSLTLSCAASQYSVTFLSVAWYRQAPGKKRELVAGISDDGSNVYIDSVKGRFTISRDNAKNSVYLQMNSLRAEDTAVYYCYAYSWIDSLRYWGQGTLVTVSS

SEQ ID NO: 1749 - protein, 117 aa, synthetic construct
  REGION 1..117: note = Description of Artificial Sequence: Synthetic polypeptide
EVQLVESGGGLVQPGGSLTLSCAASGETVSFLSLAWYRQAPGKKRELVAGISTDGSTVYFVSVKGRFTISRDNAKNSVYLQMNSLRAEDTAVYYCYAYSWTTPRAYWGQGTLVTVSS

SEQ ID NO: 1750 - protein, 117 aa, synthetic construct
  REGION 1..117: note = Description of Artificial Sequence: Synthetic polypeptide
EVQLVESGGGLVQPGGSLTLSCAASLSSVSVLSIAWYRQAPGKKRELVAGISTDGSTVYIDSVKGRFTISRDNAKNSVYLQMNSLRAEDTAVYYCYAYSWTTSLPYWGQGTLVTVSS

SEQ ID NO: 1751 - protein, 10 aa, synthetic construct
  REGION 1..10: note = Description of Artificial Sequence: Synthetic peptide
GSIFSIASMG

SEQ ID NO: 1752 - protein, 10 aa, synthetic construct
  REGION 1..10: note = Description of Artificial Sequence: Synthetic peptide
GSIFSIASMG

SEQ ID NO: 1753 - protein, 10 aa, synthetic construct
  REGION 1..10: note = Description of Artificial Sequence: Synthetic peptide
GSIFSIASMA

SEQ ID NO: 1754 - protein, 10 aa, synthetic construct
  REGION 1..10: note = Description of Artificial Sequence: Synthetic peptide
ESIFSINVMA

SEQ ID NO: 1755 - protein, 10 aa, synthetic construct
  REGION 1..10: note = Description of Artificial Sequence: Synthetic peptide
GSSFSITSMA

SEQ ID NO: 1756 - protein, 10 aa, synthetic construct
  REGION 1..10: note = Description of Artificial Sequence: Synthetic peptide
SSIFSISSMS

SEQ ID NO: 1757 - protein, 10 aa, synthetic construct
  REGION 1..10: note = Description of Artificial Sequence: Synthetic peptide
SSIFSISSMS

SEQ ID NO: 1758 - protein, 10 aa, synthetic construct
  REGION 1..10: note = Description of Artificial Sequence: Synthetic peptide
GSTLNIKIMA

SEQ ID NO: 1759 - protein, 10 aa, synthetic construct
  REGION 1..10: note = Description of Artificial Sequence: Synthetic peptide
GSTLNIKIMA

SEQ ID NO: 1760 - protein, 10 aa, synthetic construct
  REGION 1..10: note = Description of Artificial Sequence: Synthetic peptide
GSTFNIKTMA

SEQ ID NO: 1761 - protein, 10 aa, synthetic construct
  REGION 1..10: note = Description of Artificial Sequence: Synthetic peptide
GSTFNIKLMA

SEQ ID NO: 1762 - protein, 10 aa, synthetic construct
  REGION 1..10: note = Description of Artificial Sequence: Synthetic peptide
GSTFNFKIMA

SEQ ID NO: 1763 - protein, 10 aa, synthetic construct
  REGION 1..10: note = Description of Artificial Sequence: Synthetic peptide
GFMFSSYSMS

SEQ ID NO: 1764 - protein, 10 aa, synthetic construct
  REGION 1..10: note = Description of Artificial Sequence: Synthetic peptide
GFMFSSYSMS

SEQ ID NO: 1765 - protein, 10 aa, synthetic construct
  REGION 1..10: note = Description of Artificial Sequence: Synthetic peptide
GFTFSSHSMS

SEQ ID NO: 1766 - protein, 10 aa, synthetic construct
  REGION 1..10: note = Description of Artificial Sequence: Synthetic peptide
GSSFSHNTMG

SEQ ID NO: 1767 - protein, 10 aa, synthetic construct
  REGION 1..10: note = Description of Artificial Sequence: Synthetic peptide
GGRFSYATMG

SEQ ID NO: 1768 - protein, 10 aa, synthetic construct
  REGION 1..10: note = Description of Artificial Sequence: Synthetic peptide
GSRFSYATMG

SEQ ID NO: 1769 - protein, 10 aa, synthetic construct
  REGION 1..10: note = Description of Artificial Sequence: Synthetic peptide
GSTFTSNVMG

SEQ ID NO: 1770 - protein, 10 aa, synthetic construct
  REGION 1..10: note = Description of Artificial Sequence: Synthetic peptide
GSSVSFLSMA

SEQ ID NO: 1771 - protein, 10 aa, synthetic construct
  REGION 1..10: note = Description of Artificial Sequence: Synthetic peptide
GSSVSFLSMA

SEQ ID NO: 1772 - protein, 10 aa, synthetic construct
  REGION 1..10: note = Description of Artificial Sequence: Synthetic peptide
GSSVSFLSMA

SEQ ID NO: 1773 - protein, 10 aa, synthetic construct
  REGION 1..10: note = Description of Artificial Sequence: Synthetic peptide
GSSVSFLSMA

SEQ ID NO: 1774 - protein, 10 aa, synthetic construct
  REGION 1..10: note = Description of Artificial Sequence: Synthetic peptide
GSSVSFLSMA

SEQ ID NO: 1775 - protein, 10 aa, synthetic construct
  REGION 1..10: note = Description of Artificial Sequence: Synthetic peptide
GSSVSFLSMA

SEQ ID NO: 1776 - protein, 10 aa, synthetic construct
  REGION 1..10: note = Description of Artificial Sequence: Synthetic peptide
GSSVSFLSMA

SEQ ID NO: 1777 - protein, 10 aa, synthetic construct
  REGION 1..10: note = Description of Artificial Sequence: Synthetic peptide
GSSVSFLSIA

SEQ ID NO: 1778 - protein, 10 aa, synthetic construct
  REGION 1..10: note = Description of Artificial Sequence: Synthetic peptide
GSSVSFLSMA

SEQ ID NO: 1779 - protein, 10 aa, synthetic construct
  REGION 1..10: note = Description of Artificial Sequence: Synthetic peptide
GSSVSFLSMA

SEQ ID NO: 1780 - protein, 10 aa, synthetic construct
  REGION 1..10: note = Description of Artificial Sequence: Synthetic peptide
GSSVSFLSMA

SEQ ID NO: 1781 - protein, 10 aa, synthetic construct
  REGION 1..10: note = Description of Artificial Sequence: Synthetic peptide
GSSVSFLSMA

SEQ ID NO: 1782 - protein, 10 aa, synthetic construct
  REGION 1..10: note = Description of Artificial Sequence: Synthetic peptide
GSSVSFLSMA

SEQ ID NO: 1783 - protein, 10 aa, synthetic construct
  REGION 1..10: note = Description of Artificial Sequence: Synthetic peptide
GSSVSFLSMA

SEQ ID NO: 1784 - protein, 10 aa, synthetic construct
  REGION 1..10: note = Description of Artificial Sequence: Synthetic peptide
GFTLDYYAIG

SEQ ID NO: 1785 - protein, 10 aa, synthetic construct
  REGION 1..10: note = Description of Artificial Sequence: Synthetic peptide
GSTSSINAMG

SEQ ID NO: 1786 - protein, 10 aa, synthetic construct
  REGION 1..10: note = Description of Artificial Sequence: Synthetic peptide
GSTSSINAMG

SEQ ID NO: 1787 - protein, 10 aa, synthetic construct
  REGION 1..10: note = Description of Artificial Sequence: Synthetic peptide
GITSSVYSMG

SEQ ID NO: 1788 - protein, 10 aa, synthetic construct
  REGION 1..10: note = Description of Artificial Sequence: Synthetic peptide
GRTSMFNSMG

SEQ ID NO: 1789 - protein, 10 aa, synthetic construct
  REGION 1..10: note = Description of Artificial Sequence: Synthetic peptide
GRTSMVNSMG

SEQ ID NO: 1790 - protein, 10 aa, synthetic construct
  REGION 1..10: note = Description of Artificial Sequence: Synthetic peptide
GSVSMFNSMG

SEQ ID NO: 1791 - protein, 10 aa, synthetic construct
  REGION 1..10: note = Description of Artificial Sequence: Synthetic peptide
GSIFSIAVMG

SEQ ID NO: 1792 - protein, 10 aa, synthetic construct
  REGION 1..10: note = Description of Artificial Sequence: Synthetic peptide
SGIFSDMSMV

SEQ ID NO: 1793 - protein, 10 aa, synthetic construct
  REGION 1..10: note = Description of Artificial Sequence: Synthetic peptide
GSISSIIVMG

SEQ ID NO: 1794 - protein, 10 aa, synthetic construct
  REGION 1..10: note = Description of Artificial Sequence: Synthetic peptide
GSISSIIVMG

SEQ ID NO: 1795 - protein, 10 aa, synthetic construct
  REGION 1..10: note = Description of Artificial Sequence: Synthetic peptide
GSIFTTNSMG

SEQ ID NO: 1796 - protein, 9 aa, synthetic construct
  REGION 1..9: note = Description of Artificial Sequence: Synthetic peptide
GSREISTMG

SEQ ID NO: 1797 - protein, 9 aa, synthetic construct
  REGION 1..9: note = Description of Artificial Sequence: Synthetic peptide
GSREISTMG

SEQ ID NO: 1798 - protein, 9 aa, synthetic construct
  REGION 1..9: note = Description of Artificial Sequence: Synthetic peptide
GSREISTMG

SEQ ID NO: 1799 - protein, 9 aa, synthetic construct
  REGION 1..9: note = Description of Artificial Sequence: Synthetic peptide
GSREISTMG

SEQ ID NO: 1800 - protein, 10 aa, synthetic construct
  REGION 1..10: note = Description of Artificial Sequence: Synthetic peptide
GSIFRGAAMY

SEQ ID NO: 1801 - protein, 10 aa, synthetic construct
  REGION 1..10: note = Description of Artificial Sequence: Synthetic peptide
GSISSFNFMS

SEQ ID NO: 1802 - protein, 10 aa, synthetic construct
  REGION 1..10: note = Description of Artificial Sequence: Synthetic peptide
GTIFTASTMG

SEQ ID NO: 1803 - protein, 10 aa, synthetic construct
  REGION 1..10: note = Description of Artificial Sequence: Synthetic peptide
GSIFSIASMG

SEQ ID NO: 1804 - protein, 10 aa, synthetic construct
  REGION 1..10: note = Description of Artificial Sequence: Synthetic peptide
GRTSMFNSMG

SEQ ID NO: 1805 - protein, 10 aa, synthetic construct
  REGION 1..10: note = Description of Artificial Sequence: Synthetic peptide
GSSVSFLSMA

SEQ ID NO: 1806 - protein, 10 aa, synthetic construct
  REGION 1..10: note = Description of Artificial Sequence: Synthetic peptide
GSIFRGAAMY

SEQ ID NO: 1807 - protein, 10 aa, synthetic construct
  REGION 1..10: note = Description of Artificial Sequence: Synthetic peptide
GSTFNIKTMA

SEQ ID NO: 1808 - protein, 10 aa, synthetic construct
  REGION 1..10: note = Description of Artificial Sequence: Synthetic peptide
GSTLNIKIMA

SEQ ID NO: 1809 - protein, 10 aa, synthetic construct
  REGION 1..10: note = Description of Artificial Sequence: Synthetic peptide
SSIFSISSMS

SEQ ID NO: 1810 - protein, 10 aa, synthetic construct
  REGION 1..10: note = Description of Artificial Sequence: Synthetic peptide
GSTSSINAMG

SEQ ID NO: 1811 - protein, 10 aa, synthetic construct
  REGION 1..10: note = Description of Artificial Sequence: Synthetic peptide
GFMFSSYSMS

SEQ ID NO: 1812 - protein, 10 aa, synthetic construct
  REGION 1..10: note = Description of Artificial Sequence: Synthetic peptide
GSVSMFNSMG

SEQ ID NO: 1813 - protein, 10 aa, synthetic construct
  REGION 1..10: note = Description of Artificial Sequence: Synthetic peptide
GGRFSYATMG

SEQ ID NO: 1814 - protein, 10 aa, synthetic construct
  REGION 1..10: note = Description of Artificial Sequence: Synthetic peptide
GSISSFNFMS

SEQ ID NO: 1815 - protein, 10 aa, synthetic construct
  REGION 1..10: note = Description of Artificial Sequence: Synthetic peptide
ESIFSINVMA

SEQ ID NO: 1816 - protein, 9 aa, synthetic construct
  REGION 1..9: note = Description of Artificial Sequence: Synthetic peptide
GSREISTMG

SEQ ID NO: 1817 - protein, 10 aa, synthetic construct
  REGION 1..10: note = Description of Artificial Sequence: Synthetic peptide
GSIFSIAVMG

SEQ ID NO: 1818 - protein, 10 aa, synthetic construct
  REGION 1..10: note = Description of Artificial Sequence: Synthetic peptide
GSTSSINAMG

SEQ ID NO: 1819 - protein, 10 aa, synthetic construct
  REGION 1..10: note = Description of Artificial Sequence: Synthetic peptide
SGIFSDMSMV

SEQ ID NO: 1820 - protein, 10 aa, synthetic construct
  REGION 1..10: note = Description of Artificial Sequence: Synthetic peptide
GFMFSSYSMS

SEQ ID NO: 1821 - protein, 10 aa, synthetic construct
  REGION 1..10: note = Description of Artificial Sequence: Synthetic peptide
GSRFSYATMG

SEQ ID NO: 1822 - protein, 10 aa, synthetic construct
  REGION 1..10: note = Description of Artificial Sequence: Synthetic peptide
GSTFTSNVMG

SEQ ID NO: 1823 - protein, 10 aa, synthetic construct
  REGION 1..10: note = Description of Artificial Sequence: Synthetic peptide
GSSVSFLSMA

SEQ ID NO: 1824 - protein, 10 aa, synthetic construct
  REGION 1..10: note = Description of Artificial Sequence: Synthetic peptide
GSISSIIVMG

SEQ ID NO: 1825 - protein, 10 aa, synthetic construct
  REGION 1..10: note = Description of Artificial Sequence: Synthetic peptide
GSSVSFLSMA

SEQ ID NO: 1826 - protein, 10 aa, synthetic construct
  REGION 1..10: note = Description of Artificial Sequence: Synthetic peptide
GTIFTASTMG

SEQ ID NO: 1827 - protein, 10 aa, synthetic construct
  REGION 1..10: note = Description of Artificial Sequence: Synthetic peptide
GSSVSFLSMA

SEQ ID NO: 1828 - protein, 10 aa, synthetic construct
  REGION 1..10: note = Description of Artificial Sequence: Synthetic peptide
GSSFSHNTMG

SEQ ID NO: 1829 - protein, 10 aa, synthetic construct
  REGION 1..10: note = Description of Artificial Sequence: Synthetic peptide
GSISSIIVMG

SEQ ID NO: 1830 - protein, 10 aa, synthetic construct
  REGION 1..10: note = Description of Artificial Sequence: Synthetic peptide
GSSFSITSMA

SEQ ID NO: 1831 - protein, 10 aa, synthetic construct
  REGION 1..10: note = Description of Artificial Sequence: Synthetic peptide
GRTSMVNSMG

SEQ ID NO: 1832 - protein, 10 aa, synthetic construct
  REGION 1..10: note = Description of Artificial Sequence: Synthetic peptide
GSTFNFKIMA

SEQ ID NO: 1833 - protein, 10 aa, synthetic construct
  REGION 1..10: note = Description of Artificial Sequence: Synthetic peptide
GFTLDYYAIG

SEQ ID NO: 1834 - protein, 10 aa, synthetic construct
  REGION 1..10: note = Description of Artificial Sequence: Synthetic peptide
GSIFTTNSMG

SEQ ID NO: 1835 - protein, 10 aa, synthetic construct
  REGION 1..10: note = Description of Artificial Sequence: Synthetic peptide
GITSSVYSMG

SEQ ID NO: 1836 - protein, 10 aa, synthetic construct
  REGION 1..10: note = Description of Artificial Sequence: Synthetic peptide
SSIFSISSMS

SEQ ID NO: 1837 - protein, 10 aa, synthetic construct
  REGION 1..10: note = Description of Artificial Sequence: Synthetic peptide
GFTSSINAMG

SEQ ID NO: 1838 - protein, 10 aa, synthetic construct
  REGION 1..10: note = Description of Artificial Sequence: Synthetic peptide
GSTSSINAMA

SEQ ID NO: 1839 - protein, 10 aa, synthetic construct
  REGION 1..10: note = Description of Artificial Sequence: Synthetic peptide
GSTSSINAMG

SEQ ID NO: 1840 - protein, 10 aa, synthetic construct
  REGION 1..10: note = Description of Artificial Sequence: Synthetic peptide
GSPSSINAMG

SEQ ID NO: 1841 - protein, 10 aa, synthetic construct
  REGION 1..10: note = Description of Artificial Sequence: Synthetic peptide
GSTSSINAMG

SEQ ID NO: 1842 - protein, 10 aa, synthetic construct
  REGION 1..10: note = Description of Artificial Sequence: Synthetic peptide
GSISSINAMG

SEQ ID NO: 1843 - protein, 10 aa, synthetic construct
  REGION 1..10: note = Description of Artificial Sequence: Synthetic peptide
GSTSSINAMA

SEQ ID NO: 1844 - protein, 10 aa, synthetic construct
  REGION 1..10: note = Description of Artificial Sequence: Synthetic peptide
GSTSSINAYG

SEQ ID NO: 1845 - protein, 10 aa, synthetic construct
  REGION 1..10: note = Description of Artificial Sequence: Synthetic peptide
GSTSSINAIG

SEQ ID NO: 1846 - protein, 10 aa, synthetic construct
  REGION 1..10: note = Description of Artificial Sequence: Synthetic peptide
GSTSSINAMA

SEQ ID NO: 1847 - protein, 10 aa, synthetic construct
  REGION 1..10: note = Description of Artificial Sequence: Synthetic peptide
GSTSIINAMG

SEQ ID NO: 1848 - protein, 10 aa, synthetic construct
  REGION 1..10: note = Description of Artificial Sequence: Synthetic peptide
GSTSSINAMG

SEQ ID NO: 1849 - protein, 10 aa, synthetic construct
  REGION 1..10: note = Description of Artificial Sequence: Synthetic peptide
GKTSSINAMA

SEQ ID NO: 1850 - protein, 10 aa, synthetic construct
  REGION 1..10: note = Description of Artificial Sequence: Synthetic peptide
GTTSSINAMG

SEQ ID NO: 1851 - protein, 10 aa, synthetic construct
  REGION 1..10: note = Description of Artificial Sequence: Synthetic peptide
GSTSSINAMA

SEQ ID NO: 1852 - protein, 10 aa, synthetic construct
  REGION 1..10: note = Description of Artificial Sequence: Synthetic peptide
GSGSSINAMG

SEQ ID NO: 1853 - protein, 10 aa, synthetic construct
  REGION 1..10: note = Description of Artificial Sequence: Synthetic peptide
GTTSSINAMG

SEQ ID NO: 1854 - protein, 10 aa, synthetic construct
  REGION 1..10: note = Description of Artificial Sequence: Synthetic peptide
GSTSSINAMA

SEQ ID NO: 1855 - protein, 10 aa, synthetic construct
  REGION 1..10: note = Description of Artificial Sequence: Synthetic peptide
GSTSRINAMG

SEQ ID NO: 1856 - protein, 10 aa, synthetic construct
  REGION 1..10: note = Description of Artificial Sequence: Synthetic peptide
GSTSRINAMG

SEQ ID NO: 1857 - protein, 10 aa, synthetic construct
  REGION 1..10: note = Description of Artificial Sequence: Synthetic peptide
GSTSSINAMG

SEQ ID NO: 1858 - protein, 10 aa, synthetic construct
  REGION 1..10: note = Description of Artificial Sequence: Synthetic peptide
GSTSSINAMA

SEQ ID NO: 1859 - protein, 10 aa, synthetic construct
  REGION 1..10: note = Description of Artificial Sequence: Synthetic peptide
GSTSSINAMA

SEQ ID NO: 1860 - protein, 10 aa, synthetic construct
  REGION 1..10: note = Description of Artificial Sequence: Synthetic peptide
GNTSSINAMA

SEQ ID NO: 1861 - protein, 10 aa, synthetic construct
  REGION 1..10: note = Description of Artificial Sequence: Synthetic peptide
GSTSSINAMA

SEQ ID NO: 1862 - protein, 10 aa, synthetic construct
  REGION 1..10: note = Description of Artificial Sequence: Synthetic peptide
GSTSIINAMG

SEQ ID NO: 1863 - protein, 10 aa, synthetic construct
  REGION 1..10: note = Description of Artificial Sequence: Synthetic peptide
GSTSSINAMA

SEQ ID NO: 1864 - protein, 10 aa, synthetic construct
  REGION 1..10: note = Description of Artificial Sequence: Synthetic peptide
GSTSRINAMG

SEQ ID NO: 1865 - protein, 10 aa, synthetic construct
  REGION 1..10: note = Description of Artificial Sequence: Synthetic peptide
GSTSRINAMG

SEQ ID NO: 1866 - protein, 10 aa, synthetic construct
  REGION 1..10: note = Description of Artificial Sequence: Synthetic peptide
GTTSSINAMG

SEQ ID NO: 1867 - protein, 10 aa, synthetic construct
  REGION 1..10: note = Description of Artificial Sequence: Synthetic peptide
GITSSINAMG

SEQ ID NO: 1868 - protein, 10 aa, synthetic construct
  REGION 1..10: note = Description of Artificial Sequence: Synthetic peptide
GSTSDINAMG

SEQ ID NO: 1869 - protein, 10 aa, synthetic construct
  REGION 1..10: note = Description of Artificial Sequence: Synthetic peptide
GSTSSINAMA

SEQ ID NO: 1870 - protein, 10 aa, synthetic construct
  REGION 1..10: note = Description of Artificial Sequence: Synthetic peptide
GSTSSINAIG

SEQ ID NO: 1871 - protein, 10 aa, synthetic construct
  REGION 1..10: note = Description of Artificial Sequence: Synthetic peptide
GSTSSKNAMG

SEQ ID NO: 1872 - protein, 10 aa, synthetic construct
  REGION 1..10: note = Description of Artificial Sequence: Synthetic peptide
GSTSSINAMG

SEQ ID NO: 1873 - protein, 10 aa, synthetic construct
  REGION 1..10: note = Description of Artificial Sequence: Synthetic peptide
GLTSSINAMG

SEQ ID NO: 1874 - protein, 10 aa, synthetic construct
  REGION 1..10: note = Description of Artificial Sequence: Synthetic peptide
GSTSSINAMA

SEQ ID NO: 1875 - protein, 10 aa, synthetic construct
  REGION 1..10: note = Description of Artificial Sequence: Synthetic peptide
GSTSSNNAMA

SEQ ID NO: 1876 - protein, 10 aa, synthetic construct
  REGION 1..10: note = Description of Artificial Sequence: Synthetic peptide
GSTSSINAMA

SEQ ID NO: 1877 - protein, 10 aa, synthetic construct
  REGION 1..10: note = Description of Artificial Sequence: Synthetic peptide
GSTSHINAMG

SEQ ID NO: 1878 - protein, 10 aa, synthetic construct
  REGION 1..10: note = Description of Artificial Sequence: Synthetic peptide
GQTSSINAMG

SEQ ID NO: 1879 - protein, 10 aa, synthetic construct
  REGION 1..10: note = Description of Artificial Sequence: Synthetic peptide
GSTSRINGMG

SEQ ID NO: 1880 - protein, 10 aa, synthetic construct
  REGION 1..10: note = Description of Artificial Sequence: Synthetic peptide
GSTSVINAMA

SEQ ID NO: 1881 - protein, 10 aa, synthetic construct
  REGION 1..10: note = Description of Artificial Sequence: Synthetic peptide
GSTSSINAMA

SEQ ID NO: 1882 - protein, 10 aa, synthetic construct
  REGION 1..10: note = Description of Artificial Sequence: Synthetic peptide
GKTSSINAMG

SEQ ID NO: 1883 - protein, 10 aa, synthetic construct
  REGION 1..10: note = Description of Artificial Sequence: Synthetic peptide
GSTSSINAMA

SEQ ID NO: 1884 - protein, 10 aa, synthetic construct
  REGION 1..10: note = Description of Artificial Sequence: Synthetic peptide
GSVSSINAMG

SEQ ID NO: 1885 - protein, 10 aa, synthetic construct
  REGION 1..10: note = Description of Artificial Sequence: Synthetic peptide
GNTSSINAMG

SEQ ID NO: 1886 - protein, 10 aa, synthetic construct
  REGION 1..10: note = Description of Artificial Sequence: Synthetic peptide
GSTSSTNAMG

SEQ ID NO: 1887 - protein, 10 aa, synthetic construct
  REGION 1..10: note = Description of Artificial Sequence: Synthetic peptide
GSTSSINAMG

SEQ ID NO: 1888 - protein, 10 aa, synthetic construct
  REGION 1..10: note = Description of Artificial Sequence: Synthetic peptide
GSTSSINAMA

SEQ ID NO: 1889 - protein, 10 aa, synthetic construct
  REGION 1..10: note = Description of Artificial Sequence: Synthetic peptide
GGTSSINAMG

SEQ ID NO: 1890 - protein, 10 aa, synthetic construct
  REGION 1..10: note = Description of Artificial Sequence: Synthetic peptide
GSTRSINAMG

SEQ ID NO: 1891 - protein, 10 aa, synthetic construct
  REGION 1..10: note = Description of Artificial Sequence: Synthetic peptide
GTTSSINAMG

SEQ ID NO: 1892 - protein, 10 aa, synthetic construct
  REGION 1..10: note = Description of Artificial Sequence: Synthetic peptide
GSTSSINAMG

SEQ ID NO: 1893 - protein, 10 aa, synthetic construct
  REGION 1..10: note = Description of Artificial Sequence: Synthetic peptide
GSTSSINAMA

SEQ ID NO: 1894 - protein, 10 aa, synthetic construct
  REGION 1..10: note = Description of Artificial Sequence: Synthetic peptide
GNTSSINAMG

SEQ ID NO: 1895 - protein, 10 aa, synthetic construct
  REGION 1..10: note = Description of Artificial Sequence: Synthetic peptide
GSTSRINAMG

SEQ ID NO: 1896 - protein, 10 aa, synthetic construct
  REGION 1..10: note = Description of Artificial Sequence: Synthetic peptide
GSTSSINAIG

SEQ ID NO: 1897 - protein, 10 aa, synthetic construct
  REGION 1..10: note = Description of Artificial Sequence: Synthetic peptide
GLTSSINAMG

SEQ ID NO: 1898 - protein, 10 aa, synthetic construct
  REGION 1..10: note = Description of Artificial Sequence: Synthetic peptide
GSTSSINAMA

SEQ ID NO: 1899 - protein, 10 aa, synthetic construct
  REGION 1..10: note = Description of Artificial Sequence: Synthetic peptide
GSTSSTNAMG

SEQ ID NO: 1900 - protein, 10 aa, synthetic construct
  REGION 1..10: note = Description of Artificial Sequence: Synthetic peptide
GSTSSINAIG

SEQ ID NO: 1901 - protein, 10 aa, synthetic construct
  REGION 1..10: note = Description of Artificial Sequence: Synthetic peptide
GSTSSINAIG

SEQ ID NO: 1902 - protein, 10 aa, synthetic construct
  REGION 1..10: note = Description of Artificial Sequence: Synthetic peptide
GSTSSINAMG

SEQ ID NO: 1903 - protein, 10 aa, synthetic construct
  REGION 1..10: note = Description of Artificial Sequence: Synthetic peptide
GSTSSINAMG

SEQ ID NO: 1904 - protein, 10 aa, synthetic construct
  REGION 1..10: note = Description of Artificial Sequence: Synthetic peptide
GSTSSINAMA

SEQ ID NO: 1905 - protein, 10 aa, synthetic construct
  REGION 1..10: note = Description of Artificial Sequence: Synthetic peptide
GSTSSINAMA

SEQ ID NO: 1906 - protein, 10 aa, synthetic construct
  REGION 1..10: note = Description of Artificial Sequence: Synthetic peptide
GSKSSINAMG

SEQ ID NO: 1907 - protein, 10 aa, synthetic construct
  REGION 1..10: note = Description of Artificial Sequence: Synthetic peptide
GTTSSINAMG

SEQ ID NO: 1908 - protein, 10 aa, synthetic construct
  REGION 1..10: note = Description of Artificial Sequence: Synthetic peptide
GSTSSINAFG

SEQ ID NO: 1909 - protein, 10 aa, synthetic construct
  REGION 1..10: note = Description of Artificial Sequence: Synthetic peptide
GSTFSINAMG

SEQ ID NO: 1910 - protein, 10 aa, synthetic construct
  REGION 1..10: note = Description of Artificial Sequence: Synthetic peptide
GSTRSINAMG

SEQ ID NO: 1911 - protein, 10 aa, synthetic construct
  REGION 1..10: note = Description of Artificial Sequence: Synthetic peptide
GSTSSINAIG

SEQ ID NO: 1912 - protein, 10 aa, synthetic construct
  REGION 1..10: note = Description of Artificial Sequence: Synthetic peptide
GSTSSINAMG

SEQ ID NO: 1913 - protein, 10 aa, synthetic construct
  REGION 1..10: note = Description of Artificial Sequence: Synthetic peptide
GSTSSINAMG

SEQ ID NO: 1914 - protein, 10 aa, synthetic construct
  REGION 1..10: note = Description of Artificial Sequence: Synthetic peptide
GTTSSINAMG

SEQ ID NO: 1915 - protein, 10 aa, synthetic construct
  REGION 1..10: note = Description of Artificial Sequence: Synthetic peptide
GSTSSINAMA

SEQ ID NO: 1916 - protein, 10 aa, synthetic construct
  REGION 1..10: note = Description of Artificial Sequence: Synthetic peptide
GRTSSINAMG

SEQ ID NO: 1917 - protein, 10 aa, synthetic construct
  REGION 1..10: note = Description of Artificial Sequence: Synthetic peptide
GSTSSRNAMG

SEQ ID NO: 1918 - protein, 10 aa, synthetic construct
  REGION 1..10: note = Description of Artificial Sequence: Synthetic peptide
GSTKSINAMG

SEQ ID NO: 1919 - protein, 10 aa, synthetic construct
  REGION 1..10: note = Description of Artificial Sequence: Synthetic peptide
GSTSSRNAMG

SEQ ID NO: 1920 - protein, 10 aa, synthetic construct
  REGION 1..10: note = Description of Artificial Sequence: Synthetic peptide
GSTSSINAIG

SEQ ID NO: 1921 - protein, 10 aa, synthetic construct
  REGION 1..10: note = Description of Artificial Sequence: Synthetic peptide
GSTSLINAMG

SEQ ID NO: 1922 - protein, 10 aa, synthetic construct
  REGION 1..10: note = Description of Artificial Sequence: Synthetic peptide
GSTSSINAMA

SEQ ID NO: 1923 - protein, 10 aa, synthetic construct
  REGION 1..10: note = Description of Artificial Sequence: Synthetic peptide
GSTSSINAMG

SEQ ID NO: 1924 - protein, 10 aa, synthetic construct
  REGION 1..10: note = Description of Artificial Sequence: Synthetic peptide
GTTSSINAMG

SEQ ID NO: 1925 - protein, 10 aa, synthetic construct
  REGION 1..10: note = Description of Artificial Sequence: Synthetic peptide
GSTSSINAFG

SEQ ID NO: 1926 - protein, 10 aa, synthetic construct
  REGION 1..10: note = Description of Artificial Sequence: Synthetic peptide
GSTSSRNAMG

SEQ ID NO: 1927 - protein, 10 aa, synthetic construct
  REGION 1..10: note = Description of Artificial Sequence: Synthetic peptide
GNTSSINAMG

SEQ ID NO: 1928 - protein, 10 aa, synthetic construct
  REGION 1..10: note = Description of Artificial Sequence: Synthetic peptide
GTTSSINAMG

SEQ ID NO: 1929 - protein, 10 aa, synthetic construct
  REGION 1..10: note = Description of Artificial Sequence: Synthetic peptide
GSTASINAMG

SEQ ID NO: 1930 - protein, 10 aa, synthetic construct
  REGION 1..10: note = Description of Artificial Sequence: Synthetic peptide
GSTSSINAVG

SEQ ID NO: 1931 - protein, 10 aa, synthetic construct
  REGION 1..10: note = Description of Artificial Sequence: Synthetic peptide
GSTSSRNAMG

SEQ ID NO: 1932 - protein, 10 aa, synthetic construct
  REGION 1..10: note = Description of Artificial Sequence: Synthetic peptide
GSTNSINAMG

SEQ ID NO: 1933 - protein, 10 aa, synthetic construct
  REGION 1..10: note = Description of Artificial Sequence: Synthetic peptide
GSTSSINAMA

SEQ ID NO: 1934 - protein, 10 aa, synthetic construct
  REGION 1..10: note = Description of Artificial Sequence: Synthetic peptide
GSTSRINAMG

SEQ ID NO: 1935 - protein, 10 aa, synthetic construct
  REGION 1..10: note = Description of Artificial Sequence: Synthetic peptide
GSTSNINAMG

SEQ ID NO: 1936 - protein, 10 aa, synthetic construct
  REGION 1..10: note = Description of Artificial Sequence: Synthetic peptide
GSTSKINAMG

SEQ ID NO: 1937 - protein, 10 aa, synthetic construct
  REGION 1..10: note = Description of Artificial Sequence: Synthetic peptide
GSTSSINALG

SEQ ID NO: 1938 - protein, 10 aa, synthetic construct
  REGION 1..10: note = Description of Artificial Sequence: Synthetic peptide
GKTSSINAMG

SEQ ID NO: 1939 - protein, 10 aa, synthetic construct
  REGION 1..10: note = Description of Artificial Sequence: Synthetic peptide
GSTSSINAVG

SEQ ID NO: 1940 - protein, 10 aa, synthetic construct
  REGION 1..10: note = Description of Artificial Sequence: Synthetic peptide
GSTSRINAMG

SEQ ID NO: 1941 - protein, 10 aa, synthetic construct
  REGION 1..10: note = Description of Artificial Sequence: Synthetic peptide
GSTSSINAMG

SEQ ID NO: 1942 - protein, 10 aa, synthetic construct
  REGION 1..10: note = Description of Artificial Sequence: Synthetic peptide
GSTSSINAVG

SEQ ID NO: 1943 - protein, 10 aa, synthetic construct
  REGION 1..10: note = Description of Artificial Sequence: Synthetic peptide
GTTSSINAMG

SEQ ID NO: 1944 - protein, 10 aa, synthetic construct
  REGION 1..10: note = Description of Artificial Sequence: Synthetic peptide
GSTSSINAMG

SEQ ID NO: 1945 - protein, 10 aa, synthetic construct
  REGION 1..10: note = Description of Artificial Sequence: Synthetic peptide
GTTSSINAMG

SEQ ID NO: 1946 - protein, 10 aa, synthetic construct
  REGION 1..10: note = Description of Artificial Sequence: Synthetic peptide
GKTSSINAMG

SEQ ID NO: 1947 - protein, 10 aa, synthetic construct
  REGION 1..10: note = Description of Artificial Sequence: Synthetic peptide
GSTSSINAMG

SEQ ID NO: 1948 - protein, 10 aa, synthetic construct
  REGION 1..10: note = Description of Artificial Sequence: Synthetic peptide
GSTSAINAMG

SEQ ID NO: 1949 - protein, 10 aa, synthetic construct
  REGION 1..10: note = Description of Artificial Sequence: Synthetic peptide
GSPSSINAYG

SEQ ID NO: 1950 - protein, 10 aa, synthetic construct
  REGION 1..10: note = Description of Artificial Sequence: Synthetic peptide
GSTSSINAMG

SEQ ID NO: 1951 - protein, 10 aa, synthetic construct
  REGION 1..10: note = Description of Artificial Sequence: Synthetic peptide
GSRSSINAMG

SEQ ID NO: 1952 - protein, 10 aa, synthetic construct
  REGION 1..10: note = Description of Artificial Sequence: Synthetic peptide
GSVSSINAMG

SEQ ID NO: 1953 - protein, 10 aa, synthetic construct
  REGION 1..10: note = Description of Artificial Sequence: Synthetic peptide
GSTSSINAMA

SEQ ID NO: 1954 - protein, 10 aa, synthetic construct
  REGION 1..10: note = Description of Artificial Sequence: Synthetic peptide
GSTSSINAIG

SEQ ID NO: 1955 - protein, 10 aa, synthetic construct
  REGION 1..10: note = Description of Artificial Sequence: Synthetic peptide
GSTSSINAMG

SEQ ID NO: 1956 - protein, 10 aa, synthetic construct
  REGION 1..10: note = Description of Artificial Sequence: Synthetic peptide
GSTSSINAVG

SEQ ID NO: 1957 - protein, 10 aa, synthetic construct
  REGION 1..10: note = Description of Artificial Sequence: Synthetic peptide
GSTSSINAMA

SEQ ID NO: 1958 - protein, 10 aa, synthetic construct
  REGION 1..10: note = Description of Artificial Sequence: Synthetic peptide
GSTSSINAYG

SEQ ID NO: 1959 - protein, 10 aa, synthetic construct
  REGION 1..10: note = Description of Artificial Sequence: Synthetic peptide
GSTSSINAVG

SEQ ID NO: 1960 - protein, 10 aa, synthetic construct
  REGION 1..10: note = Description of Artificial Sequence: Synthetic peptide
GSKSSINAMG

SEQ ID NO: 1961 - protein, 10 aa, synthetic construct
  REGION 1..10: note = Description of Artificial Sequence: Synthetic peptide
GSTSSINAMA

SEQ ID NO: 1962 - protein, 10 aa, synthetic construct
  REGION 1..10: note = Description of Artificial Sequence: Synthetic peptide
GSVSSINAMG

SEQ ID NO: 1963 - protein, 10 aa, synthetic construct
  REGION 1..10: note = Description of Artificial Sequence: Synthetic peptide
GSTSSINAMG

SEQ ID NO: 1964 - protein, 10 aa, synthetic construct
  REGION 1..10: note = Description of Artificial Sequence: Synthetic peptide
GSTSSINAMG

SEQ ID NO: 1965 - protein, 10 aa, synthetic construct
  REGION 1..10: note = Description of Artificial Sequence: Synthetic peptide
GSTSSINAMA

SEQ ID NO: 1966 - protein, 10 aa, synthetic construct
  REGION 1..10: note = Description of Artificial Sequence: Synthetic peptide
GSTSYINAMG

SEQ ID NO: 1967 - protein, 10 aa, synthetic construct
  REGION 1..10: note = Description of Artificial Sequence: Synthetic peptide
GSTSSINAMG

SEQ ID NO: 1968 - protein, 10 aa, synthetic construct
  REGION 1..10: note = Description of Artificial Sequence: Synthetic peptide
GSTSSINAMG

SEQ ID NO: 1969 - protein, 10 aa, synthetic construct
  REGION 1..10: note = Description of Artificial Sequence: Synthetic peptide
GSTSSINAMG

SEQ ID NO: 1970 - protein, 10 aa, synthetic construct
  REGION 1..10: note = Description of Artificial Sequence: Synthetic peptide
GSTSRINAMG

SEQ ID NO: 1971 - protein, 10 aa, synthetic construct
  REGION 1..10: note = Description of Artificial Sequence: Synthetic peptide
GSTSSINAMA

SEQ ID NO: 1972 - protein, 10 aa, synthetic construct
  REGION 1..10: note = Description of Artificial Sequence: Synthetic peptide
GSTSSINAMA

SEQ ID NO: 1973 - protein, 10 aa, synthetic construct
  REGION 1..10: note = Description of Artificial Sequence: Synthetic peptide
GSTSSINAMG

SEQ ID NO: 1974 - protein, 10 aa, synthetic construct
  REGION 1..10: note = Description of Artificial Sequence: Synthetic peptide
GSTSTINAMG

SEQ ID NO: 1975 - protein, 10 aa, synthetic construct
  REGION 1..10: note = Description of Artificial Sequence: Synthetic peptide
GSTSSINAVG

SEQ ID NO: 1976 - protein, 10 aa, synthetic construct
  REGION 1..10: note = Description of Artificial Sequence: Synthetic peptide
GSTSSINAMG

SEQ ID NO: 1977 - protein, 10 aa, synthetic construct
  REGION 1..10: note = Description of Artificial Sequence: Synthetic peptide
GSPSSINAYG

SEQ ID NO: 1978 - protein, 10 aa, synthetic construct
  REGION 1..10: note = Description of Artificial Sequence: Synthetic peptide
GSPSSINAYG

SEQ ID NO: 1979 - protein, 10 aa, synthetic construct
  REGION 1..10: note = Description of Artificial Sequence: Synthetic peptide
GSSVKFLSMA

SEQ ID NO: 1980 - protein, 10 aa, synthetic construct
  REGION 1..10: note = Description of Artificial Sequence: Synthetic peptide
GSSVSFLSLA

SEQ ID NO: 1981 - protein, 10 aa, synthetic construct
  REGION 1..10: note = Description of Artificial Sequence: Synthetic peptide
GSRVSFLSMA

SEQ ID NO: 1982 - protein, 10 aa, synthetic construct
  REGION 1..10: note = Description of Artificial Sequence: Synthetic peptide
GSQVSFLSMA

SEQ ID NO: 1983 - protein, 10 aa, synthetic construct
  REGION 1..10: note = Description of Artificial Sequence: Synthetic peptide
GSSVSFLSMA

SEQ ID NO: 1984 - protein, 10 aa, synthetic construct
  REGION 1..10: note = Description of Artificial Sequence: Synthetic peptide
GSKVSFLSMA

SEQ ID NO: 1985 - protein, 10 aa, synthetic construct
  REGION 1..10: note = Description of Artificial Sequence: Synthetic peptide
GSSVGFLSMA

SEQ ID NO: 1986 - protein, 10 aa, synthetic construct
  REGION 1..10: note = Description of Artificial Sequence: Synthetic peptide
GSSVSFLSMA

SEQ ID NO: 1987 - protein, 10 aa, synthetic construct
  REGION 1..10: note = Description of Artificial Sequence: Synthetic peptide
GSRVSFLSMA

SEQ ID NO: 1988 - protein, 10 aa, synthetic construct
  REGION 1..10: note = Description of Artificial Sequence: Synthetic peptide
GSSVSFLSLA

SEQ ID NO: 1989 - protein, 10 aa, synthetic construct
  REGION 1..10: note = Description of Artificial Sequence: Synthetic peptide
GSSVSFLSMA

SEQ ID NO: 1990 - protein, 10 aa, synthetic construct
  REGION 1..10: note = Description of Artificial Sequence: Synthetic peptide
GSSVQFLSMA

SEQ ID NO: 1991 - protein, 10 aa, synthetic construct
  REGION 1..10: note = Description of Artificial Sequence: Synthetic peptide
GSNVSFLSMA

SEQ ID NO: 1992 - protein, 10 aa, synthetic construct
  REGION 1..10: note = Description of Artificial Sequence: Synthetic peptide
GSSVKFLSMA

SEQ ID NO: 1993 - protein, 10 aa, synthetic construct
  REGION 1..10: note = Description of Artificial Sequence: Synthetic peptide
GKSVSFLSMA

SEQ ID NO: 1994 - protein, 10 aa, synthetic construct
  REGION 1..10: note = Description of Artificial Sequence: Synthetic peptide
GSRVSFLSMA

SEQ ID NO: 1995 - protein, 10 aa, synthetic construct
  REGION 1..10: note = Description of Artificial Sequence: Synthetic peptide
GSHVSFLSMA

SEQ ID NO: 1996 - protein, 10 aa, synthetic construct
  REGION 1..10: note = Description of Artificial Sequence: Synthetic peptide
GSSVSFLSMA

SEQ ID NO: 1997 - protein, 10 aa, synthetic construct
  REGION 1..10: note = Description of Artificial Sequence: Synthetic peptide
GSSVSFLSMA

SEQ ID NO: 1998 - protein, 10 aa, synthetic construct
  REGION 1..10: note = Description of Artificial Sequence: Synthetic peptide
GSSVRFLSMA

SEQ ID NO: 1999 - protein, 10 aa, synthetic construct
  REGION 1..10: note = Description of Artificial Sequence: Synthetic peptide
GSSVRFLSMA

SEQ ID NO: 2000 - protein, 10 aa, synthetic construct
  REGION 1..10: note = Description of Artificial Sequence: Synthetic peptide
GSSVRFLSMA

SEQ ID NO: 2001 - protein, 10 aa, synthetic construct
  REGION 1..10: note = Description of Artificial Sequence: Synthetic peptide
GSHVSFLSMA

SEQ ID NO: 2002 - protein, 10 aa, synthetic construct
  REGION 1..10: note = Description of Artificial Sequence: Synthetic peptide
GTSVSFLSMA

SEQ ID NO: 2003 - protein, 10 aa, synthetic construct
  REGION 1..10: note = Description of Artificial Sequence: Synthetic peptide
GTSVSFLSIA

SEQ ID NO: 2004 - protein, 10 aa, synthetic construct
  REGION 1..10: note = Description of Artificial Sequence: Synthetic peptide
GSSVKFLSMA

SEQ ID NO: 2005 - protein, 10 aa, synthetic construct
  REGION 1..10: note = Description of Artificial Sequence: Synthetic peptide
GSSVSFLSMA

SEQ ID NO: 2006 - protein, 10 aa, synthetic construct
  REGION 1..10: note = Description of Artificial Sequence: Synthetic peptide
GSSVRFLSMA

SEQ ID NO: 2007 - protein, 10 aa, synthetic construct
  REGION 1..10: note = Description of Artificial Sequence: Synthetic peptide
GSSVSFLSMA

SEQ ID NO: 2008 - protein, 10 aa, synthetic construct
  REGION 1..10: note = Description of Artificial Sequence: Synthetic peptide
GSSVRFLSMA

SEQ ID NO: 2009 - protein, 10 aa, synthetic construct
  REGION 1..10: note = Description of Artificial Sequence: Synthetic peptide
GSSVVFLSMA

SEQ ID NO: 2010 - protein, 10 aa, synthetic construct
  REGION 1..10: note = Description of Artificial Sequence: Synthetic peptide
GSSVRFLSMA

SEQ ID NO: 2011 - protein, 10 aa, synthetic construct
  REGION 1..10: note = Description of Artificial Sequence: Synthetic peptide
GSSVRFLSMA

SEQ ID NO: 2012 - protein, 10 aa, synthetic construct
  REGION 1..10: note = Description of Artificial Sequence: Synthetic peptide
GSSVRFLSMA

SEQ ID NO: 2013 - protein, 10 aa, synthetic construct
  REGION 1..10: note = Description of Artificial Sequence: Synthetic peptide
GSSVSRLSMA

SEQ ID NO: 2014 - protein, 10 aa, synthetic construct
  REGION 1..10: note = Description of Artificial Sequence: Synthetic peptide
GSSKSFLSMA

SEQ ID NO: 2015 - protein, 10 aa, synthetic construct
  REGION 1..10: note = Description of Artificial Sequence: Synthetic peptide
GSSVSRLSMA

SEQ ID NO: 2016 - protein, 10 aa, synthetic construct
  REGION 1..10: note = Description of Artificial Sequence: Synthetic peptide
GSSVKFLSMA

SEQ ID NO: 2017 - protein, 10 aa, synthetic construct
  REGION 1..10: note = Description of Artificial Sequence: Synthetic peptide
GSGVRFLSMA

SEQ ID NO: 2018 - protein, 10 aa, synthetic construct
  REGION 1..10: note = Description of Artificial Sequence: Synthetic peptide
GSSVRFLSMA

SEQ ID NO: 2019 - protein, 10 aa, synthetic construct
  REGION 1..10: note = Description of Artificial Sequence: Synthetic peptide
GSSVHFLSMA

SEQ ID NO: 2020 - protein, 10 aa, synthetic construct
  REGION 1..10: note = Description of Artificial Sequence: Synthetic peptide
GSSVRFLSMA

SEQ ID NO: 2021 - protein, 10 aa, synthetic construct
  REGION 1..10: note = Description of Artificial Sequence: Synthetic peptide
GSKVSFLSMA

SEQ ID NO: 2022 - protein, 10 aa, synthetic construct
  REGION 1..10: note = Description of Artificial Sequence: Synthetic peptide
GSSVSFLSMA

SEQ ID NO: 2023 - protein, 10 aa, synthetic construct
  REGION 1..10: note = Description of Artificial Sequence: Synthetic peptide
GSKVSFLSMA

SEQ ID NO: 2024 - protein, 10 aa, synthetic construct
  REGION 1..10: note = Description of Artificial Sequence: Synthetic peptide
GSRVSFLSMA

SEQ ID NO: 2025 - protein, 10 aa, synthetic construct
  REGION 1..10: note = Description of Artificial Sequence: Synthetic peptide
GSRVSFLSMA

SEQ ID NO: 2026 - protein, 10 aa, synthetic construct
  REGION 1..10: note = Description of Artificial Sequence: Synthetic peptide
GSSVRFLSMA

SEQ ID NO: 2027 - protein, 10 aa, synthetic construct
  REGION 1..10: note = Description of Artificial Sequence: Synthetic peptide
YSSVSRLSMA

SEQ ID NO: 2028 - protein, 10 aa, synthetic construct
  REGION 1..10: note = Description of Artificial Sequence: Synthetic peptide
GSSVSFLSMA

SEQ ID NO: 2029 - protein, 10 aa, synthetic construct
  REGION 1..10: note = Description of Artificial Sequence: Synthetic peptide
GSSVSFLSMA

SEQ ID NO: 2030 - protein, 10 aa, synthetic construct
  REGION 1..10: note = Description of Artificial Sequence: Synthetic peptide
GSSVSFLSMA

SEQ ID NO: 2031 - protein, 10 aa, synthetic construct
  REGION 1..10: note = Description of Artificial Sequence: Synthetic peptide
GTSVSFLSMA

SEQ ID NO: 2032 - protein, 10 aa, synthetic construct
  REGION 1..10: note = Description of Artificial Sequence: Synthetic peptide
GSSVKFLSMA

SEQ ID NO: 2033 - protein, 10 aa, synthetic construct
  REGION 1..10: note = Description of Artificial Sequence: Synthetic peptide
GSSVSFLSMA

SEQ ID NO: 2034 - protein, 10 aa, synthetic construct
  REGION 1..10: note = Description of Artificial Sequence: Synthetic peptide
GSRVSFLSMA

SEQ ID NO: 2035 - protein, 10 aa, synthetic construct
  REGION 1..10: note = Description of Artificial Sequence: Synthetic peptide
GSSVSVLSMA

SEQ ID NO: 2036 - protein, 10 aa, synthetic construct
  REGION 1..10: note = Description of Artificial Sequence: Synthetic peptide
GSSVSFLSMA

SEQ ID NO: 2037 - protein, 10 aa, synthetic construct
  REGION 1..10: note = Description of Artificial Sequence: Synthetic peptide
GSRVSFLSMA

SEQ ID NO: 2038 - protein, 10 aa, synthetic construct
  REGION 1..10: note = Description of Artificial Sequence: Synthetic peptide
GSSVKFLSMA

SEQ ID NO: 2039 - protein, 10 aa, synthetic construct
  REGION 1..10: note = Description of Artificial Sequence: Synthetic peptide
GSSVRFLSMA

SEQ ID NO: 2040 - protein, 10 aa, synthetic construct
  REGION 1..10: note = Description of Artificial Sequence: Synthetic peptide
GSSVSQLSMA

SEQ ID NO: 2041 - protein, 10 aa, synthetic construct
  REGION 1..10: note = Description of Artificial Sequence: Synthetic peptide
GSRVSFLSMA

SEQ ID NO: 2042 - protein, 10 aa, synthetic construct
  REGION 1..10: note = Description of Artificial Sequence: Synthetic peptide
KSSVSFLSMA

SEQ ID NO: 2043 - protein, 10 aa, synthetic construct
  REGION 1..10: note = Description of Artificial Sequence: Synthetic peptide
GSSVSFLSMA

SEQ ID NO: 2044 - protein, 10 aa, synthetic construct
  REGION 1..10: note = Description of Artificial Sequence: Synthetic peptide
GSSVKFLSMA

SEQ ID NO: 2045 - protein, 10 aa, synthetic construct
  REGION 1..10: note = Description of Artificial Sequence: Synthetic peptide
GSSVRFLSMA

SEQ ID NO: 2046 - protein, 10 aa, synthetic construct
  REGION 1..10: note = Description of Artificial Sequence: Synthetic peptide
GSSVRFLSMA

SEQ ID NO: 2047 - protein, 10 aa, synthetic construct
  REGION 1..10: note = Description of Artificial Sequence: Synthetic peptide
GSRVSFLSMA

SEQ ID NO: 2048 - protein, 10 aa, synthetic construct
  REGION 1..10: note = Description of Artificial Sequence: Synthetic peptide
GSSVSFLSLA

SEQ ID NO: 2049 - protein, 10 aa, synthetic construct
  REGION 1..10: note = Description of Artificial Sequence: Synthetic peptide
GSSVRFLSMA

SEQ ID NO: 2050 - protein, 10 aa, synthetic construct
  REGION 1..10: note = Description of Artificial Sequence: Synthetic peptide
GSKVSFLSMA

SEQ ID NO: 2051 - protein, 10 aa, synthetic construct
  REGION 1..10: note = Description of Artificial Sequence: Synthetic peptide
GSSVSFLSMA

SEQ ID NO: 2052 - protein, 10 aa, synthetic construct
  REGION 1..10: note = Description of Artificial Sequence: Synthetic peptide
GSSVRFLSMA

SEQ ID NO: 2053 - protein, 10 aa, synthetic construct
  REGION 1..10: note = Description of Artificial Sequence: Synthetic peptide
GSKVSFLSMA

SEQ ID NO: 2054 - protein, 10 aa, synthetic construct
  REGION 1..10: note = Description of Artificial Sequence: Synthetic peptide
GSSVKFLSMA

SEQ ID NO: 2055 - protein, 10 aa, synthetic construct
  REGION 1..10: note = Description of Artificial Sequence: Synthetic peptide
GSSVKFLSMA

SEQ ID NO: 2056 - protein, 10 aa, synthetic construct
  REGION 1..10: note = Description of Artificial Sequence: Synthetic peptide
GSRVSFLSMA

SEQ ID NO: 2057 - protein, 10 aa, synthetic construct
  REGION 1..10: note = Description of Artificial Sequence: Synthetic peptide
GSSVLFLSMA

SEQ ID NO: 2058 - protein, 10 aa, synthetic construct
  REGION 1..10: note = Description of Artificial Sequence: Synthetic peptide
GSRVSFLSMA

SEQ ID NO: 2059 - protein, 10 aa, synthetic construct
  REGION 1..10: note = Description of Artificial Sequence: Synthetic peptide
GSRVSFLSMA

SEQ ID NO: 2060 - protein, 10 aa, synthetic construct
  REGION 1..10: note = Description of Artificial Sequence: Synthetic peptide
GSSVGFLSMA

SEQ ID NO: 2061 - protein, 10 aa, synthetic construct
  REGION 1..10: note = Description of Artificial Sequence: Synthetic peptide
GSSVSFMSMA

SEQ ID NO: 2062 - protein, 10 aa, synthetic construct
  REGION 1..10: note = Description of Artificial Sequence: Synthetic peptide
GSSVSFLSMA

SEQ ID NO: 2063 - protein, 10 aa, synthetic construct
  REGION 1..10: note = Description of Artificial Sequence: Synthetic peptide
GSSVTFLSMA

SEQ ID NO: 2064 - protein, 10 aa, synthetic construct
  REGION 1..10: note = Description of Artificial Sequence: Synthetic peptide
GSSVRFLSMA

SEQ ID NO: 2065 - protein, 10 aa, synthetic construct
  REGION 1..10: note = Description of Artificial Sequence: Synthetic peptide
GSKVSFLSMA

SEQ ID NO: 2066 - protein, 10 aa, synthetic construct
  REGION 1..10: note = Description of Artificial Sequence: Synthetic peptide
GSKVSFMSMA

SEQ ID NO: 2067 - protein, 10 aa, synthetic construct
  REGION 1..10: note = Description of Artificial Sequence: Synthetic peptide
GSSVSNLSMA

SEQ ID NO: 2068 - protein, 10 aa, synthetic construct
  REGION 1..10: note = Description of Artificial Sequence: Synthetic peptide
NSSVSKLSMA

SEQ ID NO: 2069 - protein, 10 aa, synthetic construct
  REGION 1..10: note = Description of Artificial Sequence: Synthetic peptide
GSKVSFLSMA

SEQ ID NO: 2070 - protein, 10 aa, synthetic construct
  REGION 1..10: note = Description of Artificial Sequence: Synthetic peptide
GSQVSFLSMA

SEQ ID NO: 2071 - protein, 10 aa, synthetic construct
  REGION 1..10: note = Description of Artificial Sequence: Synthetic peptide
GSKVSFMSMA

SEQ ID NO: 2072 - protein, 10 aa, synthetic construct
  REGION 1..10: note = Description of Artificial Sequence: Synthetic peptide
GSRVSFLSMA

SEQ ID NO: 2073 - protein, 10 aa, synthetic construct
  REGION 1..10: note = Description of Artificial Sequence: Synthetic peptide
GSSVRFLSMA

SEQ ID NO: 2074 - protein, 10 aa, synthetic construct
  REGION 1..10: note = Description of Artificial Sequence: Synthetic peptide
GSKVSFLSMA

SEQ ID NO: 2075 - protein, 10 aa, synthetic construct
  REGION 1..10: note = Description of Artificial Sequence: Synthetic peptide
GSSVRFLSMA

SEQ ID NO: 2076 - protein, 10 aa, synthetic construct
  REGION 1..10: note = Description of Artificial Sequence: Synthetic peptide
GSSVSFLSIA

SEQ ID NO: 2077 - protein, 10 aa, synthetic construct
  REGION 1..10: note = Description of Artificial Sequence: Synthetic peptide
GSSSSFLSMA

SEQ ID NO: 2078 - protein, 10 aa, synthetic construct
  REGION 1..10: note = Description of Artificial Sequence: Synthetic peptide
GSSVKFLSMA

SEQ ID NO: 2079 - protein, 10 aa, synthetic construct
  REGION 1..10: note = Description of Artificial Sequence: Synthetic peptide
GSSVNFLSMA

SEQ ID NO: 2080 - protein, 10 aa, synthetic construct
  REGION 1..10: note = Description of Artificial Sequence: Synthetic peptide
GSSVKFLSMA

SEQ ID NO: 2081 - protein, 10 aa, synthetic construct
  REGION 1..10: note = Description of Artificial Sequence: Synthetic peptide
GSSVSFLSMA

SEQ ID NO: 2082 - protein, 10 aa, synthetic construct
  REGION 1..10: note = Description of Artificial Sequence: Synthetic peptide
GSSVRFLSMA

SEQ ID NO: 2083 - protein, 10 aa, synthetic construct
  REGION 1..10: note = Description of Artificial Sequence: Synthetic peptide
GSSVSFLSVA

SEQ ID NO: 2084 - protein, 10 aa, synthetic construct
  REGION 1..10: note = Description of Artificial Sequence: Synthetic peptide
GSQVSFLSMA

SEQ ID NO: 2085 - protein, 10 aa, synthetic construct
  REGION 1..10: note = Description of Artificial Sequence: Synthetic peptide
GTSVSFLSMA

SEQ ID NO: 2086 - protein, 10 aa, synthetic construct
  REGION 1..10: note = Description of Artificial Sequence: Synthetic peptide
GSRVSFLSMA

SEQ ID NO: 2087 - protein, 10 aa, synthetic construct
  REGION 1..10: note = Description of Artificial Sequence: Synthetic peptide
GSSVKFLSMA

SEQ ID NO: 2088 - protein, 10 aa, synthetic construct
  REGION 1..10: note = Description of Artificial Sequence: Synthetic peptide
GSSVSFLSSA

SEQ ID NO: 2089 - protein, 10 aa, synthetic construct
  REGION 1..10: note = Description of Artificial Sequence: Synthetic peptide
GSSVKFLSMA

SEQ ID NO: 2090 - protein, 10 aa, synthetic construct
  REGION 1..10: note = Description of Artificial Sequence: Synthetic peptide
GSSVSFLSMA

SEQ ID NO: 2091 - protein, 10 aa, synthetic construct
  REGION 1..10: note = Description of Artificial Sequence: Synthetic peptide
GSTVSFLSMA

SEQ ID NO: 2092 - protein, 10 aa, synthetic construct
  REGION 1..10: note = Description of Artificial Sequence: Synthetic peptide
GSSVQFLSMA

SEQ ID NO: 2093 - protein, 10 aa, synthetic construct
  REGION 1..10: note = Description of Artificial Sequence: Synthetic peptide
RSSVSFLSMA

SEQ ID NO: 2094 - protein, 10 aa, synthetic construct
  REGION 1..10: note = Description of Artificial Sequence: Synthetic peptide
GSKVSFLSMA

SEQ ID NO: 2095 - protein, 10 aa, synthetic construct
  REGION 1..10: note = Description of Artificial Sequence: Synthetic peptide
GSRVSFLSMA

SEQ ID NO: 2096 - protein, 10 aa, synthetic construct
  REGION 1..10: note = Description of Artificial Sequence: Synthetic peptide
GSSVSFLSMA

SEQ ID NO: 2097 - protein, 10 aa, synthetic construct
  REGION 1..10: note = Description of Artificial Sequence: Synthetic peptide
GSKVSFLSMA

SEQ ID NO: 2098 - protein, 10 aa, synthetic construct
  REGION 1..10: note = Description of Artificial Sequence: Synthetic peptide
GSSVRFLSMA

SEQ ID NO: 2099 - protein, 10 aa, synthetic construct
  REGION 1..10: note = Description of Artificial Sequence: Synthetic peptide
GSSVKFLSMA

SEQ ID NO: 2100 - protein, 10 aa, synthetic construct
  REGION 1..10: note = Description of Artificial Sequence: Synthetic peptide
GSSVKFLSMA

SEQ ID NO: 2101 - protein, 10 aa, synthetic construct
  REGION 1..10: note = Description of Artificial Sequence: Synthetic peptide
GSSVSILSMA

SEQ ID NO: 2102 - protein, 10 aa, synthetic construct
  REGION 1..10: note = Description of Artificial Sequence: Synthetic peptide
GSSVSFLSVA

SEQ ID NO: 2103 - protein, 10 aa, synthetic construct
  REGION 1..10: note = Description of Artificial Sequence: Synthetic peptide
GSSVRFLSMA

SEQ ID NO: 2104 - protein, 10 aa, synthetic construct
  REGION 1..10: note = Description of Artificial Sequence: Synthetic peptide
GSRVSFLSMA

SEQ ID NO: 2105 - protein, 10 aa, synthetic construct
  REGION 1..10: note = Description of Artificial Sequence: Synthetic peptide
GHSVSFLSMA

SEQ ID NO: 2106 - protein, 10 aa, synthetic construct
  REGION 1..10: note = Description of Artificial Sequence: Synthetic peptide
GSSVRFLSMA

SEQ ID NO: 2107 - protein, 10 aa, synthetic construct
  REGION 1..10: note = Description of Artificial Sequence: Synthetic peptide
GSSVSFLSMA

SEQ ID NO: 2108 - protein, 10 aa, synthetic construct
  REGION 1..10: note = Description of Artificial Sequence: Synthetic peptide
GSRVSFLSMA

SEQ ID NO: 2109 - protein, 10 aa, synthetic construct
  REGION 1..10: note = Description of Artificial Sequence: Synthetic peptide
GSSVKFLSMA

SEQ ID NO: 2110 - protein, 10 aa, synthetic construct
  REGION 1..10: note = Description of Artificial Sequence: Synthetic peptide
GSSVSRLSMA

SEQ ID NO: 2111 - protein, 10 aa, synthetic construct
  REGION 1..10: note = Description of Artificial Sequence: Synthetic peptide
GRSVSFLSMA

SEQ ID NO: 2112 - protein, 10 aa, synthetic construct
  REGION 1..10: note = Description of Artificial Sequence: Synthetic peptide
GRSVSFLSMA

SEQ ID NO: 2113 - protein, 10 aa, synthetic construct
  REGION 1..10: note = Description of Artificial Sequence: Synthetic peptide
GSSVKFLSMA

SEQ ID NO: 2114 - protein, 10 aa, synthetic construct
  REGION 1..10: note = Description of Artificial Sequence: Synthetic peptide
GSSVSKLSMA

SEQ ID NO: 2115 - protein, 10 aa, synthetic construct
  REGION 1..10: note = Description of Artificial Sequence: Synthetic peptide
GSSVSRLSMA

SEQ ID NO: 2116 - protein, 10 aa, synthetic construct
  REGION 1..10: note = Description of Artificial Sequence: Synthetic peptide
GSSVKFLSLA

SEQ ID NO: 2117 - protein, 10 aa, synthetic construct
  REGION 1..10: note = Description of Artificial Sequence: Synthetic peptide
GSSVSRLSLA

SEQ ID NO: 2118 - protein, 10 aa, synthetic construct
  REGION 1..10: note = Description of Artificial Sequence: Synthetic peptide
GTSSSINAMG

SEQ ID NO: 2119 - protein, 10 aa, synthetic construct
  REGION 1..10: note = Description of Artificial Sequence: Synthetic peptide
GTTSSINAIG

SEQ ID NO: 2120 - protein, 10 aa, synthetic construct
  REGION 1..10: note = Description of Artificial Sequence: Synthetic peptide
GSTSSINAMA

SEQ ID NO: 2121 - protein, 10 aa, synthetic construct
  REGION 1..10: note = Description of Artificial Sequence: Synthetic peptide
GQTYRVNAFG

SEQ ID NO: 2122 - protein, 10 aa, synthetic construct
  REGION 1..10: note = Description of Artificial Sequence: Synthetic peptide
GSTSSINAMA

SEQ ID NO: 2123 - protein, 10 aa, synthetic construct
  REGION 1..10: note = Description of Artificial Sequence: Synthetic peptide
GSASLTNATG

SEQ ID NO: 2124 - protein, 10 aa, synthetic construct
  REGION 1..10: note = Description of Artificial Sequence: Synthetic peptide
GYPSLNNAMG

SEQ ID NO: 2125 - protein, 10 aa, synthetic construct
  REGION 1..10: note = Description of Artificial Sequence: Synthetic peptide
GSSSTINAIG

SEQ ID NO: 2126 - protein, 10 aa, synthetic construct
  REGION 1..10: note = Description of Artificial Sequence: Synthetic peptide
GSTSYINAMG

SEQ ID NO: 2127 - protein, 10 aa, synthetic construct
  REGION 1..10: note = Description of Artificial Sequence: Synthetic peptide
GSTSSVNALG

SEQ ID NO: 2128 - protein, 10 aa, synthetic construct
  REGION 1..10: note = Description of Artificial Sequence: Synthetic peptide
GSTSLSNAVG

SEQ ID NO: 2129 - protein, 10 aa, synthetic construct
  REGION 1..10: note = Description of Artificial Sequence: Synthetic peptide
GSTSSTNAIG

SEQ ID NO: 2130 - protein, 10 aa, synthetic construct
  REGION 1..10: note = Description of Artificial Sequence: Synthetic peptide
GLTSTINAMG

SEQ ID NO: 2131 - protein, 10 aa, synthetic construct
  REGION 1..10: note = Description of Artificial Sequence: Synthetic peptide
GVSPSKNAIG

SEQ ID NO: 2132 - protein, 10 aa, synthetic construct
  REGION 1..10: note = Description of Artificial Sequence: Synthetic peptide
GSTSSINAVG

SEQ ID NO: 2133 - protein, 10 aa, synthetic construct
  REGION 1..10: note = Description of Artificial Sequence: Synthetic peptide
GSTTMNNAMA

SEQ ID NO: 2134 - protein, 10 aa, synthetic construct
  REGION 1..10: note = Description of Artificial Sequence: Synthetic peptide
GSTSKINAIG

SEQ ID NO: 2135 - protein, 10 aa, synthetic construct
  REGION 1..10: note = Description of Artificial Sequence: Synthetic peptide
GQTTALNAMG

SEQ ID NO: 2136 - protein, 10 aa, synthetic construct
  REGION 1..10: note = Description of Artificial Sequence: Synthetic peptide
GATSSINAIG

SEQ ID NO: 2137 - protein, 10 aa, synthetic construct
  REGION 1..10: note = Description of Artificial Sequence: Synthetic peptide
GSTSTINAMG

SEQ ID NO: 2138 - protein, 10 aa, synthetic construct
  REGION 1..10: note = Description of Artificial Sequence: Synthetic peptide
GSTSSINAMG

SEQ ID NO: 2139 - protein, 10 aa, synthetic construct
  REGION 1..10: note = Description of Artificial Sequence: Synthetic peptide
GSTSLVNAMG

SEQ ID NO: 2140 - protein, 10 aa, synthetic construct
  REGION 1..10: note = Description of Artificial Sequence: Synthetic peptide
GSTSLNNAIG

SEQ ID NO: 2141 - protein, 10 aa, synthetic construct
  REGION 1..10: note = Description of Artificial Sequence: Synthetic peptide
GSTSPVNAMA

SEQ ID NO: 2142 - protein, 10 aa, synthetic construct
  REGION 1..10: note = Description of Artificial Sequence: Synthetic peptide
GTTSSMNAIG

SEQ ID NO: 2143 - protein, 10 aa, synthetic construct
  REGION 1..10: note = Description of Artificial Sequence: Synthetic peptide
GETSSINAMA

SEQ ID NO: 2144 - protein, 10 aa, synthetic construct
  REGION 1..10: note = Description of Artificial Sequence: Synthetic peptide
GSTSTINAIG

SEQ ID NO: 2145 - protein, 10 aa, synthetic construct
  REGION 1..10: note = Description of Artificial Sequence: Synthetic peptide
GSTYSMNAMG

SEQ ID NO: 2146 - protein, 10 aa, synthetic construct
  REGION 1..10: note = Description of Artificial Sequence: Synthetic peptide
GSPSSINAYG

SEQ ID NO: 2147 - protein, 10 aa, synthetic construct
  REGION 1..10: note = Description of Artificial Sequence: Synthetic peptide
GSTSTINAIG

SEQ ID NO: 2148 - protein, 10 aa, synthetic construct
  REGION 1..10: note = Description of Artificial Sequence: Synthetic peptide
GSTSSINAIG

SEQ ID NO: 2149 - protein, 10 aa, synthetic construct
  REGION 1..10: note = Description of Artificial Sequence: Synthetic peptide
GSISSINAMG

SEQ ID NO: 2150 - protein, 10 aa, synthetic construct
  REGION 1..10: note = Description of Artificial Sequence: Synthetic peptide
GSTQVNNAMA

SEQ ID NO: 2151 - protein, 10 aa, synthetic construct
  REGION 1..10: note = Description of Artificial Sequence: Synthetic peptide
GSTASFNAMA

SEQ ID NO: 2152 - protein, 10 aa, synthetic construct
  REGION 1..10: note = Description of Artificial Sequence: Synthetic peptide
GSPLSINAIG

SEQ ID NO: 2153 - protein, 10 aa, synthetic construct
  REGION 1..10: note = Description of Artificial Sequence: Synthetic peptide
GSTTFINAIG

SEQ ID NO: 2154 - protein, 10 aa, synthetic construct
  REGION 1..10: note = Description of Artificial Sequence: Synthetic peptide
GSTSSINAIG

SEQ ID NO: 2155 - protein, 10 aa, synthetic construct
  REGION 1..10: note = Description of Artificial Sequence: Synthetic peptide
GETDTINAVG

SEQ ID NO: 2156 - protein, 10 aa, synthetic construct
  REGION 1..10: note = Description of Artificial Sequence: Synthetic peptide
GSTSPINAIG

SEQ ID NO: 2157 - protein, 10 aa, synthetic construct
  REGION 1..10: note = Description of Artificial Sequence: Synthetic peptide
GSITSSNAMG

SEQ ID NO: 2158 - protein, 10 aa, synthetic construct
  REGION 1..10: note = Description of Artificial Sequence: Synthetic peptide
RYSVSNLSMA

SEQ ID NO: 2159 - protein, 10 aa, synthetic construct
  REGION 1..10: note = Description of Artificial Sequence: Synthetic peptide
MSTVSVLSMA

SEQ ID NO: 2160 - protein, 10 aa, synthetic construct
  REGION 1..10: note = Description of Artificial Sequence: Synthetic peptide
DSYVSLLSMA

SEQ ID NO: 2161 - protein, 10 aa, synthetic construct
  REGION 1..10: note = Description of Artificial Sequence: Synthetic peptide
DSAVSVLSIA

SEQ ID NO: 2162 - protein, 10 aa, synthetic construct
  REGION 1..10: note = Description of Artificial Sequence: Synthetic peptide
HSSVTSLSLA

SEQ ID NO: 2163 - protein, 10 aa, synthetic construct
  REGION 1..10: note = Description of Artificial Sequence: Synthetic peptide
DSVVKFLSMA

SEQ ID NO: 2164 - protein, 10 aa, synthetic construct
  REGION 1..10: note = Description of Artificial Sequence: Synthetic peptide
DPSVWNLSMA

SEQ ID NO: 2165 - protein, 10 aa, synthetic construct
  REGION 1..10: note = Description of Artificial Sequence: Synthetic peptide
GTSVMLLSLA

SEQ ID NO: 2166 - protein, 10 aa, synthetic construct
  REGION 1..10: note = Description of Artificial Sequence: Synthetic peptide
SSPVSNLSLA

SEQ ID NO: 2167 - protein, 10 aa, synthetic construct
  REGION 1..10: note = Description of Artificial Sequence: Synthetic peptide
WRSVLLLSVA

SEQ ID NO: 2168 - protein, 10 aa, synthetic construct
  REGION 1..10: note = Description of Artificial Sequence: Synthetic peptide
SSSVQYLSMA

SEQ ID NO: 2169 - protein, 10 aa, synthetic construct
  REGION 1..10: note = Description of Artificial Sequence: Synthetic peptide
GTSVSLLSLA

SEQ ID NO: 2170 - protein, 10 aa, synthetic construct
  REGION 1..10: note = Description of Artificial Sequence: Synthetic peptide
LSSVSNLSIA

SEQ ID NO: 2171 - protein, 10 aa, synthetic construct
  REGION 1..10: note = Description of Artificial Sequence: Synthetic peptide
MYSVSFLSMA

SEQ ID NO: 2172 - protein, 10 aa, synthetic construct
  REGION 1..10: note = Description of Artificial Sequence: Synthetic peptide
KSSVSHLSLA

SEQ ID NO: 2173 - protein, 10 aa, synthetic construct
  REGION 1..10: note = Description of Artificial Sequence: Synthetic peptide
YTSVLDLSIA

SEQ ID NO: 2174 - protein, 10 aa, synthetic construct
  REGION 1..10: note = Description of Artificial Sequence: Synthetic peptide
MSDVSFLSMA

SEQ ID NO: 2175 - protein, 10 aa, synthetic construct
  REGION 1..10: note = Description of Artificial Sequence: Synthetic peptide
ESSVSFLSSA

SEQ ID NO: 2176 - protein, 10 aa, synthetic construct
  REGION 1..10: note = Description of Artificial Sequence: Synthetic peptide
GDSVSLLSMA

SEQ ID NO: 2177 - protein, 10 aa, synthetic construct
  REGION 1..10: note = Description of Artificial Sequence: Synthetic peptide
GSDVWYLSLA

SEQ ID NO: 2178 - protein, 10 aa, synthetic construct
  REGION 1..10: note = Description of Artificial Sequence: Synthetic peptide
KSAVAFLSIA

SEQ ID NO: 2179 - protein, 10 aa, synthetic construct
  REGION 1..10: note = Description of Artificial Sequence: Synthetic peptide
FSAVAYLSMA

SEQ ID NO: 2180 - protein, 10 aa, synthetic construct
  REGION 1..10: note = Description of Artificial Sequence: Synthetic peptide
VYSVYDLSTA

SEQ ID NO: 2181 - protein, 10 aa, synthetic construct
  REGION 1..10: note = Description of Artificial Sequence: Synthetic peptide
GDSVSFLSMA

SEQ ID NO: 2182 - protein, 10 aa, synthetic construct
  REGION 1..10: note = Description of Artificial Sequence: Synthetic peptide
SSSVSLLSLA

SEQ ID NO: 2183 - protein, 10 aa, synthetic construct
  REGION 1..10: note = Description of Artificial Sequence: Synthetic peptide
ADSVSFLSIA

SEQ ID NO: 2184 - protein, 10 aa, synthetic construct
  REGION 1..10: note = Description of Artificial Sequence: Synthetic peptide
ASSVTLLSIA

SEQ ID NO: 2185 - protein, 10 aa, synthetic construct
  REGION 1..10: note = Description of Artificial Sequence: Synthetic peptide
ADSVSFLSIA

SEQ ID NO: 2186 - protein, 10 aa, synthetic construct
  REGION 1..10: note = Description of Artificial Sequence: Synthetic peptide
GTSVWLLSMA

SEQ ID NO: 2187 - protein, 10 aa, synthetic construct
  REGION 1..10: note = Description of Artificial Sequence: Synthetic peptide
GSSVSILSIA

SEQ ID NO: 2188 - protein, 10 aa, synthetic construct
  REGION 1..10: note = Description of Artificial Sequence: Synthetic peptide
GTAVSNLSIA

SEQ ID NO: 2189 - protein, 10 aa, synthetic construct
  REGION 1..10: note = Description of Artificial Sequence: Synthetic peptide
GSAVSMLSLA

SEQ ID NO: 2190 - protein, 10 aa, synthetic construct
  REGION 1..10: note = Description of Artificial Sequence: Synthetic peptide
GMTVFFLSMA

SEQ ID NO: 2191 - protein, 10 aa, synthetic construct
  REGION 1..10: note = Description of Artificial Sequence: Synthetic peptide
QYSVTFLSVA

SEQ ID NO: 2192 - protein, 10 aa, synthetic construct
  REGION 1..10: note = Description of Artificial Sequence: Synthetic peptide
GETVSFLSLA

SEQ ID NO: 2193 - protein, 10 aa, synthetic construct
  REGION 1..10: note = Description of Artificial Sequence: Synthetic peptide
LSSVSVLSIA

SEQ ID NO: 2194 - protein, 16 aa, synthetic construct
  REGION 1..16: note = Description of Artificial Sequence: Synthetic peptide
VITSFSSTNYADSVKG

SEQ ID NO: 2195 - protein, 16 aa, synthetic construct
  REGION 1..16: note = Description of Artificial Sequence: Synthetic peptide
VITSFSSTNYADSVKG

SEQ ID NO: 2196 - protein, 16 aa, synthetic construct
  REGION 1..16: note = Description of Artificial Sequence: Synthetic peptide
AITSFSSTNYADSVKG

SEQ ID NO: 2197 - protein, 16 aa, synthetic construct
  REGION 1..16: note = Description of Artificial Sequence: Synthetic peptide
RITSGGSTNYADSVKG

SEQ ID NO: 2198 - protein, 16 aa, synthetic construct
  REGION 1..16: note = Description of Artificial Sequence: Synthetic peptide
AITSFGSTNYADSVKD

SEQ ID NO: 2199 - protein, 16 aa, synthetic construct
  REGION 1..16: note = Description of Artificial Sequence: Synthetic peptide
AITTFDYTNYADSVKG

SEQ ID NO: 2200 - protein, 16 aa, synthetic construct
  REGION 1..16: note = Description of Artificial Sequence: Synthetic peptide
AITSFGSTNYADSVKG

SEQ ID NO: 2201 - protein, 16 aa, synthetic construct
  REGION 1..16: note = Description of Artificial Sequence: Synthetic peptide
TLTSGGNTNYADSVKG

SEQ ID NO: 2202 - protein, 16 aa, synthetic construct
  REGION 1..16: note = Description of Artificial Sequence: Synthetic peptide
TLTSGGNTNYADSVKG

SEQ ID NO: 2203 - protein, 16 aa, synthetic construct
  REGION 1..16: note = Description of Artificial Sequence: Synthetic peptide
TLTSGGNTNYADSVKG

SEQ ID NO: 2204 - protein, 16 aa, synthetic construct
  REGION 1..16: note = Description of Artificial Sequence: Synthetic peptide
TLTSGGNTNYADSVKG

SEQ ID NO: 2205 - protein, 16 aa, synthetic construct
  REGION 1..16: note = Description of Artificial Sequence: Synthetic peptide
SLTSEGLTNYRDSVKG

SEQ ID NO: 2206 - protein, 16 aa, synthetic construct
  REGION 1..16: note = Description of Artificial Sequence: Synthetic peptide
AITTWGSTNYADSVKG

SEQ ID NO: 2207 - protein, 16 aa, synthetic construct
  REGION 1..16: note = Description of Artificial Sequence: Synthetic peptide
AITSYGSTNYADSVKG

SEQ ID NO: 2208 - protein, 16 aa, synthetic construct
  REGION 1..16: note = Description of Artificial Sequence: Synthetic peptide
AITTYGSTNYIDSVKG

SEQ ID NO: 2209 - protein, 16 aa, synthetic construct
  REGION 1..16: note = Description of Artificial Sequence: Synthetic peptide
RITTFGTTNYADSVKG

SEQ ID NO: 2210 - protein, 17 aa, synthetic construct
  REGION 1..17: note = Description of Artificial Sequence: Synthetic peptide
RITSSGFSTNYADSVKG

SEQ ID NO: 2211 - protein, 17 aa, synthetic construct
  REGION 1..17: note = Description of Artificial Sequence: Synthetic peptide
RITSSGFSTNYADSVKG

SEQ ID NO: 2212 - protein, 16 aa, synthetic construct
  REGION 1..16: note = Description of Artificial Sequence: Synthetic peptide
NMHSGGSTNYADSVKG

SEQ ID NO: 2213 - protein, 16 aa, synthetic construct
  REGION 1..16: note = Description of Artificial Sequence: Synthetic peptide
GISVDGSTNYADSVKG

SEQ ID NO: 2214 - protein, 16 aa, synthetic construct
  REGION 1..16: note = Description of Artificial Sequence: Synthetic peptide
GISVDGSTNYADSVKG

SEQ ID NO: 2215 - protein, 16 aa, synthetic construct
  REGION 1..16: note = Description of Artificial Sequence: Synthetic peptide
GISVDGSTNYADSVKG

SEQ ID NO: 2216 - protein, 16 aa, synthetic construct
  REGION 1..16: note = Description of Artificial Sequence: Synthetic peptide
GISVDGSTNYADSVKG

SEQ ID NO: 2217 - protein, 16 aa, synthetic construct
  REGION 1..16: note = Description of Artificial Sequence: Synthetic peptide
GISVDGSTNYADSVKG

SEQ ID NO: 2218 - protein, 16 aa, synthetic construct
  REGION 1..16: note = Description of Artificial Sequence: Synthetic peptide
GISTDGSTNYVDSVKG

SEQ ID NO: 2219 - protein, 16 aa, synthetic construct
  REGION 1..16: note = Description of Artificial Sequence: Synthetic peptide
GISTDGTTNYVDSVKD

SEQ ID NO: 2220 - protein, 16 aa, synthetic construct
  REGION 1..16: note = Description of Artificial Sequence: Synthetic peptide
GISTDGTTNYVDSVKD

SEQ ID NO: 2221 - protein, 16 aa, synthetic construct
  REGION 1..16: note = Description of Artificial Sequence: Synthetic peptide
GISTDGTTNYVDSVKD

SEQ ID NO: 2222 - protein, 16 aa, synthetic construct
  REGION 1..16: note = Description of Artificial Sequence: Synthetic peptide
GISTDGSTNYADSVKG

SEQ ID NO: 2223 - protein, 16 aa, synthetic construct
  REGION 1..16: note = Description of Artificial Sequence: Synthetic peptide
GISTDGSTNYADSVKG

SEQ ID NO: 2224 - protein, 16 aa, synthetic construct
  REGION 1..16: note = Description of Artificial Sequence: Synthetic peptide
GISTDGSTNYADSVKG

SEQ ID NO: 2225 - protein, 16 aa, synthetic construct
  REGION 1..16: note = Description of Artificial Sequence: Synthetic peptide
GISSDGSTNYVDSVKG

SEQ ID NO: 2226 - protein, 16 aa, synthetic construct
  REGION 1..16: note = Description of Artificial Sequence: Synthetic peptide
GISADGSTDYIDSVKG

SEQ ID NO: 2227 - protein, 16 aa, synthetic construct
  REGION 1..16: note = Description of Artificial Sequence: Synthetic peptide
GISSDGSTHYVDSVKG

SEQ ID NO: 2228 - protein, 16 aa, synthetic construct
  REGION 1..16: note = Description of Artificial Sequence: Synthetic peptide
GISSDGSKNYADSVKG

SEQ ID NO: 2229 - protein, 16 aa, synthetic construct
  REGION 1..16: note = Description of Artificial Sequence: Synthetic peptide
GISSDGSKVYADSVKG

SEQ ID NO: 2230 - protein, 16 aa, synthetic construct
  REGION 1..16: note = Description of Artificial Sequence: Synthetic peptide
GSSSDGSTHYVDSVRG

SEQ ID NO: 2231 - protein, 16 aa, synthetic construct
  REGION 1..16: note = Description of Artificial Sequence: Synthetic peptide
IIRSGGSSNYADTVKG

SEQ ID NO: 2232 - protein, 16 aa, synthetic construct
  REGION 1..16: note = Description of Artificial Sequence: Synthetic peptide
LITSGGSSNYADTVKG

SEQ ID NO: 2233 - protein, 16 aa, synthetic construct
  REGION 1..16: note = Description of Artificial Sequence: Synthetic peptide
IITSGGSSNYADTVKG

SEQ ID NO: 2234 - protein, 16 aa, synthetic construct
  REGION 1..16: note = Description of Artificial Sequence: Synthetic peptide
TIFDGSYTNYADSVKG

SEQ ID NO: 2235 - protein, 16 aa, synthetic construct
  REGION 1..16: note = Description of Artificial Sequence: Synthetic peptide
SITTFGSTNYADPVKG

SEQ ID NO: 2236 - protein, 16 aa, synthetic construct
  REGION 1..16: note = Description of Artificial Sequence: Synthetic peptide
TITRDGTRNYADSLKG

SEQ ID NO: 2237 - protein, 16 aa, synthetic construct
  REGION 1..16: note = Description of Artificial Sequence: Synthetic peptide
TISRGGTRTYADSVKG

SEQ ID NO: 2238 - protein, 16 aa, synthetic construct
  REGION 1..16: note = Description of Artificial Sequence: Synthetic peptide
LIGSAGSTKYADSVKG

SEQ ID NO: 2239 - protein, 16 aa, synthetic construct
  REGION 1..16: note = Description of Artificial Sequence: Synthetic peptide
RITSGGITKYADSVKG

SEQ ID NO: 2240 - protein, 16 aa, synthetic construct
  REGION 1..16: note = Description of Artificial Sequence: Synthetic peptide
RITSGGITKYADSVKG

SEQ ID NO: 2241 - protein, 16 aa, synthetic construct
  REGION 1..16: note = Description of Artificial Sequence: Synthetic peptide
RITSGGITKYADSVKG

SEQ ID NO: 2242 - protein, 16 aa, synthetic construct
  REGION 1..16: note = Description of Artificial Sequence: Synthetic peptide
RITSGGITKYADSVKG

SEQ ID NO: 2243 - protein, 16 aa, synthetic construct
  REGION 1..16: note = Description of Artificial Sequence: Synthetic peptide
AITTSGNTSYADSVKG

SEQ ID NO: 2244 - protein, 16 aa, synthetic construct
  REGION 1..16: note = Description of Artificial Sequence: Synthetic peptide
VITRGGATNYADSVKG

SEQ ID NO: 2245 - protein, 16 aa, synthetic construct
  REGION 1..16: note = Description of Artificial Sequence: Synthetic peptide
SIAGDGRTNYAESTEG

SEQ ID NO: 2246 - protein, 16 aa, synthetic construct
  REGION 1..16: note = Description of Artificial Sequence: Synthetic peptide
VITSFSSTNYADSVKG

SEQ ID NO: 2247 - protein, 16 aa, synthetic construct
  REGION 1..16: note = Description of Artificial Sequence: Synthetic peptide
IIRSGGSSNYADTVKG

SEQ ID NO: 2248 - protein, 16 aa, synthetic construct
  REGION 1..16: note = Description of Artificial Sequence: Synthetic peptide
GISVDGSTNYADSVKG

SEQ ID NO: 2249 - protein, 16 aa, synthetic construct
  REGION 1..16: note = Description of Artificial Sequence: Synthetic peptide
AITTSGNTSYADSVKG

SEQ ID NO: 2250 - protein, 16 aa, synthetic construct
  REGION 1..16: note = Description of Artificial Sequence: Synthetic peptide
TLTSGGNTNYADSVKG

SEQ ID NO: 2251 - protein, 16 aa, synthetic construct
  REGION 1..16: note = Description of Artificial Sequence: Synthetic peptide
TLTSGGNTNYADSVKG

SEQ ID NO: 2252 - protein, 16 aa, synthetic construct
  REGION 1..16: note = Description of Artificial Sequence: Synthetic peptide
AITTFDYTNYADSVKG

SEQ ID NO: 2253 - protein, 16 aa, synthetic construct
  REGION 1..16: note = Description of Artificial Sequence: Synthetic peptide
GISSDGSKNYADSVKG

SEQ ID NO: 2254 - protein, 16 aa, synthetic construct
  REGION 1..16: note = Description of Artificial Sequence: Synthetic peptide
AITSYGSTNYADSVKG

SEQ ID NO: 2255 - protein, 16 aa, synthetic construct
  REGION 1..16: note = Description of Artificial Sequence: Synthetic peptide
IITSGGSSNYADTVKG

SEQ ID NO: 2256 - protein, 17 aa, synthetic construct
  REGION 1..17: note = Description of Artificial Sequence: Synthetic peptide
RITSSGFSTNYADSVKG

SEQ ID NO: 2257 - protein, 16 aa, synthetic construct
  REGION 1..16: note = Description of Artificial Sequence: Synthetic peptide
VITRGGATNYADSVKG

SEQ ID NO: 2258 - protein, 16 aa, synthetic construct
  REGION 1..16: note = Description of Artificial Sequence: Synthetic peptide
RITSGGSTNYADSVKG

SEQ ID NO: 2259 - protein, 16 aa, synthetic construct
  REGION 1..16: note = Description of Artificial Sequence: Synthetic peptide
RITSGGITKYADSVKG

SEQ ID NO: 2260 - protein, 16 aa, synthetic construct
  REGION 1..16: note = Description of Artificial Sequence: Synthetic peptide
TIFDGSYTNYADSVKG

SEQ ID NO: 2261 - protein, 16 aa, synthetic construct
  REGION 1..16: note = Description of Artificial Sequence: Synthetic peptide
GISSDGSKVYADSVKG

SEQ ID NO: 2262 - protein, 16 aa, synthetic construct
  REGION 1..16: note = Description of Artificial Sequence: Synthetic peptide
SITTFGSTNYADPVKG

SEQ ID NO: 2263 - protein, 16 aa, synthetic construct
  REGION 1..16: note = Description of Artificial Sequence: Synthetic peptide
AITTWGSTNYADSVKG

SEQ ID NO: 2264 - protein, 17 aa, synthetic construct
  REGION 1..17: note = Description of Artificial Sequence: Synthetic peptide
RITSSGFSTNYADSVKG

SEQ ID NO: 2265 - protein, 16 aa, synthetic construct
  REGION 1..16: note = Description of Artificial Sequence: Synthetic peptide
NMHSGGSTNYADSVKG

SEQ ID NO: 2266 - protein, 16 aa, synthetic construct
  REGION 1..16: note = Description of Artificial Sequence: Synthetic peptide
GISTDGSTNYVDSVKG

SEQ ID NO: 2267 - protein, 16 aa, synthetic construct
  REGION 1..16: note = Description of Artificial Sequence: Synthetic peptide
TITRDGTRNYADSLKG

SEQ ID NO: 2268 - protein, 16 aa, synthetic construct
  REGION 1..16: note = Description of Artificial Sequence: Synthetic peptide
GISADGSTDYIDSVKG

SEQ ID NO: 2269 - protein, 16 aa, synthetic construct
  REGION 1..16: note = Description of Artificial Sequence: Synthetic peptide
SIAGDGRTNYAESTEG

SEQ ID NO: 2270 - protein, 16 aa, synthetic construct
  REGION 1..16: note = Description of Artificial Sequence: Synthetic peptide
GISVDGSTNYADSVKG

SEQ ID NO: 2271 - protein, 16 aa, synthetic construct
  REGION 1..16: note = Description of Artificial Sequence: Synthetic peptide
RITTFGTTNYADSVKG

SEQ ID NO: 2272 - protein, 16 aa, synthetic construct
  REGION 1..16: note = Description of Artificial Sequence: Synthetic peptide
TISRGGTRTYADSVKG

SEQ ID NO: 2273 - protein, 16 aa, synthetic construct
  REGION 1..16: note = Description of Artificial Sequence: Synthetic peptide
AITSFGSTNYADSVKD

SEQ ID NO: 2274 - protein, 16 aa, synthetic construct
  REGION 1..16: note = Description of Artificial Sequence: Synthetic peptide
LITSGGSSNYADTVKG

SEQ ID NO: 2275 - protein, 16 aa, synthetic construct
  REGION 1..16: note = Description of Artificial Sequence: Synthetic peptide
SLTSEGLTNYRDSVKG

SEQ ID NO: 2276 - protein, 16 aa, synthetic construct
  REGION 1..16: note = Description of Artificial Sequence: Synthetic peptide
GISSDGSTHYVDSVKG

SEQ ID NO: 2277 - protein, 16 aa, synthetic construct
  REGION 1..16: note = Description of Artificial Sequence: Synthetic peptide
LIGSAGSTKYADSVKG

SEQ ID NO: 2278 - protein, 16 aa, synthetic construct
  REGION 1..16: note = Description of Artificial Sequence: Synthetic peptide
GSSSDGSTHYVDSVRG

SEQ ID NO: 2279 - protein, 16 aa, synthetic construct
  REGION 1..16: note = Description of Artificial Sequence: Synthetic peptide
AITSFGSTNYADSVKG

SEQ ID NO: 2280 - protein, 16 aa, synthetic construct
  REGION 1..16: note = Description of Artificial Sequence: Synthetic peptide
GISSDGSFVYADSVKG

SEQ ID NO: 2281 - protein, 16 aa, synthetic construct
  REGION 1..16: note = Description of Artificial Sequence: Synthetic peptide
GISSDGSKVYADSVKG

SEQ ID NO: 2282 - protein, 16 aa, synthetic construct
  REGION 1..16: note = Description of Artificial Sequence: Synthetic peptide
GISSDGSKVYEDSVKG

SEQ ID NO: 2283 - protein, 16 aa, synthetic construct
  REGION 1..16: note = Description of Artificial Sequence: Synthetic peptide
GISSDGSKVYADSVKG

SEQ ID NO: 2284 - protein, 16 aa, synthetic construct
  REGION 1..16: note = Description of Artificial Sequence: Synthetic peptide
GISSDGSSVYADSVKG

SEQ ID NO: 2285 - protein, 16 aa, synthetic construct
  REGION 1..16: note = Description of Artificial Sequence: Synthetic peptide
GISSDGSKVYADSVKG

SEQ ID NO: 2286 - protein, 16 aa, synthetic construct
  REGION 1..16: note = Description of Artificial Sequence: Synthetic peptide
GISSDGSKLYADSVKG

SEQ ID NO: 2287 - protein, 16 aa, synthetic construct
  REGION 1..16: note = Description of Artificial Sequence: Synthetic peptide
GISSDGSKVYADSVKG

SEQ ID NO: 2288 - protein, 16 aa, synthetic construct
  REGION 1..16: note = Description of Artificial Sequence: Synthetic peptide
GISSDGSKVYIDSVKG

SEQ ID NO: 2289 - protein, 16 aa, synthetic construct
  REGION 1..16: note = Description of Artificial Sequence: Synthetic peptide
GISSDGSKVYSDSVKG

SEQ ID NO: 2290 - protein, 16 aa, synthetic construct
  REGION 1..16: note = Description of Artificial Sequence: Synthetic peptide
GISSDGSKVIADSVKG

SEQ ID NO: 2291 - protein, 16 aa, synthetic construct
  REGION 1..16: note = Description of Artificial Sequence: Synthetic peptide
GISSDGSKIYADSVKG

SEQ ID NO: 2292 - protein, 16 aa, synthetic construct
  REGION 1..16: note = Description of Artificial Sequence: Synthetic peptide
GISSDGSKVYTDSVKG

SEQ ID NO: 2293 - protein, 16 aa, synthetic construct
  REGION 1..16: note = Description of Artificial Sequence: Synthetic peptide
GISSDGSLVYADSVKG

SEQ ID NO: 2294 - protein, 16 aa, synthetic construct
  REGION 1..16: note = Description of Artificial Sequence: Synthetic peptide
GISSDGSKVYADSVKG

SEQ ID NO: 2295 - protein, 16 aa, synthetic construct
  REGION 1..16: note = Description of Artificial Sequence: Synthetic peptide
GISSDGSKVYSDSVKG

SEQ ID NO: 2296 - protein, 16 aa, synthetic construct
  REGION 1..16: note = Description of Artificial Sequence: Synthetic peptide
GISSDGSKVYVDSVKG

SEQ ID NO: 2297 - protein, 16 aa, synthetic construct
  REGION 1..16: note = Description of Artificial Sequence: Synthetic peptide
GISSDGSKVYVDSVKG

SEQ ID NO: 2298 - protein, 16 aa, synthetic construct
  REGION 1..16: note = Description of Artificial Sequence: Synthetic peptide
GISSDGSKVYADSVKG

SEQ ID NO: 2299 - protein, 16 aa, synthetic construct
  REGION 1..16: note = Description of Artificial Sequence: Synthetic peptide
GISSDGSKVYADSVKG

SEQ ID NO: 2300 - protein, 16 aa, synthetic construct
  REGION 1..16: note = Description of Artificial Sequence: Synthetic peptide
GISSDGSKVYRDSVKG

SEQ ID NO: 2301 - protein, 16 aa, synthetic construct
  REGION 1..16: note = Description of Artificial Sequence: Synthetic peptide
GISSDGSKVYSDSVKG

SEQ ID NO: 2302 - protein, 16 aa, synthetic construct
  REGION 1..16: note = Description of Artificial Sequence: Synthetic peptide
GISSDNSKVYADSVKG

SEQ ID NO: 2303 - protein, 16 aa, synthetic construct
  REGION 1..16: note = Description of Artificial Sequence: Synthetic peptide
GISSDGSKVYADSVKG

SEQ ID NO: 2304 - protein, 16 aa, synthetic construct
  REGION 1..16: note = Description of Artificial Sequence: Synthetic peptide
GISSDGSKVYADSVKG

SEQ ID NO: 2305 - protein, 16 aa, synthetic construct
  REGION 1..16: note = Description of Artificial Sequence: Synthetic peptide
GISSDGSKVYEDSVKG

SEQ ID NO: 2306 - protein, 16 aa, synthetic construct
  REGION 1..16: note = Description of Artificial Sequence: Synthetic peptide
GISSDGSKVYADSVKG

SEQ ID NO: 2307 - protein, 16 aa, synthetic construct
  REGION 1..16: note = Description of Artificial Sequence: Synthetic peptide
GISSDGSKVYAVSVKG

SEQ ID NO: 2308 - protein, 16 aa, synthetic construct
  REGION 1..16: note = Description of Artificial Sequence: Synthetic peptide
GVSSDGSKVYADSVKG

SEQ ID NO: 2309 - protein, 16 aa, synthetic construct
  REGION 1..16: note = Description of Artificial Sequence: Synthetic peptide
GISSDGSKVYEDSVKG

SEQ ID NO: 2310 - protein, 16 aa, synthetic construct
  REGION 1..16: note = Description of Artificial Sequence: Synthetic peptide
GISSDGSKVYAGSVKG

SEQ ID NO: 2311 - protein, 16 aa, synthetic construct
  REGION 1..16: note = Description of Artificial Sequence: Synthetic peptide
GISSDKSKVYADSVKG

SEQ ID NO: 2312 - protein, 16 aa, synthetic construct
  REGION 1..16: note = Description of Artificial Sequence: Synthetic peptide
GISSNGSKVYADSVKG

SEQ ID NO: 2313 - protein, 16 aa, synthetic construct
  REGION 1..16: note = Description of Artificial Sequence: Synthetic peptide
GISSDGSKVLADSVKG

SEQ ID NO: 2314 - protein, 16 aa, synthetic construct
  REGION 1..16: note = Description of Artificial Sequence: Synthetic peptide
GISSDGSKVYADSVKG

SEQ ID NO: 2315 - protein, 16 aa, synthetic construct
  REGION 1..16: note = Description of Artificial Sequence: Synthetic peptide
GISSDNSKVYADSVKG

SEQ ID NO: 2316 - protein, 16 aa, synthetic construct
  REGION 1..16: note = Description of Artificial Sequence: Synthetic peptide
GISSDGSKVYADSVKG

SEQ ID NO: 2317 - protein, 16 aa, synthetic construct
  REGION 1..16: note = Description of Artificial Sequence: Synthetic peptide
GISSDGSKVYTDSVKG

SEQ ID NO: 2318 - protein, 16 aa, synthetic construct
  REGION 1..16: note = Description of Artificial Sequence: Synthetic peptide
GISSDGSKVYTDSVKG

SEQ ID NO: 2319 - protein, 16 aa, synthetic construct
  REGION 1..16: note = Description of Artificial Sequence: Synthetic peptide
GISSDNSKVYADSVKG

SEQ ID NO: 2320 - protein, 16 aa, synthetic construct
  REGION 1..16: note = Description of Artificial Sequence: Synthetic peptide
GISSDGSRVYADSVKG

SEQ ID NO: 2321 - protein, 16 aa, synthetic construct
  REGION 1..16: note = Description of Artificial Sequence: Synthetic peptide
GISSDGSQVYADSVKG

SEQ ID NO: 2322 - protein, 16 aa, synthetic construct
  REGION 1..16: note = Description of Artificial Sequence: Synthetic peptide
GISSDGSKAYADSVKG

SEQ ID NO: 2323 - protein, 16 aa, synthetic construct
  REGION 1..16: note = Description of Artificial Sequence: Synthetic peptide
GISSDGSKVYAKSAKG

SEQ ID NO: 2324 - protein, 16 aa, synthetic construct
  REGION 1..16: note = Description of Artificial Sequence: Synthetic peptide
GISSDGSKVYNDSVKG

SEQ ID NO: 2325 - protein, 16 aa, synthetic construct
  REGION 1..16: note = Description of Artificial Sequence: Synthetic peptide
GISSDGSKVIADSVKG

SEQ ID NO: 2326 - protein, 16 aa, synthetic construct
  REGION 1..16: note = Description of Artificial Sequence: Synthetic peptide
GISSDGSKVYTDSVKG

SEQ ID NO: 2327 - protein, 16 aa, synthetic construct
  REGION 1..16: note = Description of Artificial Sequence: Synthetic peptide
GISSDGSKVYIDSVKG

SEQ ID NO: 2328 - protein, 16 aa, synthetic construct
  REGION 1..16: note = Description of Artificial Sequence: Synthetic peptide
GISSDGSKVYYDSVKG

SEQ ID NO: 2329 - protein, 16 aa, synthetic construct
  REGION 1..16: note = Description of Artificial Sequence: Synthetic peptide
GISSDGSKVYVDSVKG

SEQ ID NO: 2330 - protein, 16 aa, synthetic construct
  REGION 1..16: note = Description of Artificial Sequence: Synthetic peptide
GISSDGSKVYGDSVKG

SEQ ID NO: 2331 - protein, 16 aa, synthetic construct
  REGION 1..16: note = Description of Artificial Sequence: Synthetic peptide
GISSDQSKVYADSAKG

SEQ ID NO: 2332 - protein, 16 aa, synthetic construct
  REGION 1..16: note = Description of Artificial Sequence: Synthetic peptide
GISSDGSKVYSDSVKG

SEQ ID NO: 2333 - protein, 16 aa, synthetic construct
  REGION 1..16: note = Description of Artificial Sequence: Synthetic peptide
GISSDGSKVYADSVKG

SEQ ID NO: 2334 - protein, 16 aa, synthetic construct
  REGION 1..16: note = Description of Artificial Sequence: Synthetic peptide
GISSDGSKVIADSVKG

SEQ ID NO: 2335 - protein, 16 aa, synthetic construct
  REGION 1..16: note = Description of Artificial Sequence: Synthetic peptide
GISSDGSKVDADSVKG

SEQ ID NO: 2336 - protein, 16 aa, synthetic construct
  REGION 1..16: note = Description of Artificial Sequence: Synthetic peptide
GISSDGSKVYKDSVKG

SEQ ID NO: 2337 - protein, 16 aa, synthetic construct
  REGION 1..16: note = Description of Artificial Sequence: Synthetic peptide
GISSNGSKVYADSVKG

SEQ ID NO: 2338 - protein, 16 aa, synthetic construct
  REGION 1..16: note = Description of Artificial Sequence: Synthetic peptide
GISSDGSKVYKDSVKG

SEQ ID NO: 2339 - protein, 16 aa, synthetic construct
  REGION 1..16: note = Description of Artificial Sequence: Synthetic peptide
GISSDGSKVYADSVKG

SEQ ID NO: 2340 - protein, 16 aa, synthetic construct
  REGION 1..16: note = Description of Artificial Sequence: Synthetic peptide
GISSDGSKVYQDSVKG

SEQ ID NO: 2341 - protein, 16 aa, synthetic construct
  REGION 1..16: note = Description of Artificial Sequence: Synthetic peptide
GISSDGSKVYAESVKG

SEQ ID NO: 2342 - protein, 16 aa, synthetic construct
  REGION 1..16: note = Description of Artificial Sequence: Synthetic peptide
GISSDGSKVLADSVKG

SEQ ID NO: 2343 - protein, 16 aa, synthetic construct
  REGION 1..16: note = Description of Artificial Sequence: Synthetic peptide
GISSDGSKYYADSVKG

SEQ ID NO: 2344 - protein, 16 aa, synthetic construct
  REGION 1..16: note = Description of Artificial Sequence: Synthetic peptide
GISSDGSKVYAVSVKG

SEQ ID NO: 2345 - protein, 16 aa, synthetic construct
  REGION 1..16: note = Description of Artificial Sequence: Synthetic peptide
GISSDGSKVVADSVKG

SEQ ID NO: 2346 - protein, 16 aa, synthetic construct
  REGION 1..16: note = Description of Artificial Sequence: Synthetic peptide
GISSDGSKVYADSVKG

SEQ ID NO: 2347 - protein, 16 aa, synthetic construct
  REGION 1..16: note = Description of Artificial Sequence: Synthetic peptide
GISSDGSKVYADSVKG

SEQ ID NO: 2348 - protein, 16 aa, synthetic construct
  REGION 1..16: note = Description of Artificial Sequence: Synthetic peptide
GISSDNSKVYADSVKG

SEQ ID NO: 2349 - protein, 16 aa, synthetic construct
  REGION 1..16: note = Description of Artificial Sequence: Synthetic peptide
GISSDGSKVYAQSVKG

SEQ ID NO: 2350 - protein, 16 aa, synthetic construct
  REGION 1..16: note = Description of Artificial Sequence: Synthetic peptide
GISSDGSKVYVDSVKG

SEQ ID NO: 2351 - protein, 16 aa, synthetic construct
  REGION 1..16: note = Description of Artificial Sequence: Synthetic peptide
GISSDGSKVYSDSVKG

SEQ ID NO: 2352 - protein, 16 aa, synthetic construct
  REGION 1..16: note = Description of Artificial Sequence: Synthetic peptide
GISSDGSKVLADSVKG

SEQ ID NO: 2353 - protein, 16 aa, synthetic construct
  REGION 1..16: note = Description of Artificial Sequence: Synthetic peptide
GISSDGSKVYNDSVKG

SEQ ID NO: 2354 - protein, 16 aa, synthetic construct
  REGION 1..16: note = Description of Artificial Sequence: Synthetic peptide
GISSDGSKVYNDSVKG

SEQ ID NO: 2355 - protein, 16 aa, synthetic construct
  REGION 1..16: note = Description of Artificial Sequence: Synthetic peptide
GISSDGSKVYVDSVKG

SEQ ID NO: 2356 - protein, 16 aa, synthetic construct
  REGION 1..16: note = Description of Artificial Sequence: Synthetic peptide
GISSDGSKVVADSVKG

SEQ ID NO: 2357 - protein, 16 aa, synthetic construct
  REGION 1..16: note = Description of Artificial Sequence: Synthetic peptide
GISSDGSKVYGDSVKG

SEQ ID NO: 2358 - protein, 16 aa, synthetic construct
  REGION 1..16: note = Description of Artificial Sequence: Synthetic peptide
GISSDGSKVYTDSVKG

SEQ ID NO: 2359 - protein, 16 aa, synthetic construct
  REGION 1..16: note = Description of Artificial Sequence: Synthetic peptide
GISSDGSKVYNDSVKG

SEQ ID NO: 2360 - protein, 16 aa, synthetic construct
  REGION 1..16: note = Description of Artificial Sequence: Synthetic peptide
GISSDGSKVTADSVKG

SEQ ID NO: 2361 - protein, 16 aa, synthetic construct
  REGION 1..16: note = Description of Artificial Sequence: Synthetic peptide
GISSDGSKVYRDSVKG

SEQ ID NO: 2362 - protein, 16 aa, synthetic construct
  REGION 1..16: note = Description of Artificial Sequence: Synthetic peptide
GISSNGSKVYSDSVKG

SEQ ID NO: 2363 - protein, 16 aa, synthetic construct
  REGION 1..16: note = Description of Artificial Sequence: Synthetic peptide
GISSDGSKVYSDSVKG

SEQ ID NO: 2364 - protein, 16 aa, synthetic construct
  REGION 1..16: note = Description of Artificial Sequence: Synthetic peptide
GISSDGSKVYADSVKG

SEQ ID NO: 2365 - protein, 16 aa, synthetic construct
  REGION 1..16: note = Description of Artificial Sequence: Synthetic peptide
GISSDGSKVYADSVKG

SEQ ID NO: 2366 - protein, 16 aa, synthetic construct
  REGION 1..16: note = Description of Artificial Sequence: Synthetic peptide
GISSDGSLVYADSVKG

SEQ ID NO: 2367 - protein, 16 aa, synthetic construct
  REGION 1..16: note = Description of Artificial Sequence: Synthetic peptide
GISSDGTKVYADSVKG

SEQ ID NO: 2368 - protein, 16 aa, synthetic construct
  REGION 1..16: note = Description of Artificial Sequence: Synthetic peptide
GISSDGSKVYADSVKG

SEQ ID NO: 2369 - protein, 16 aa, synthetic construct
  REGION 1..16: note = Description of Artificial Sequence: Synthetic peptide
GISSDGSKLYLDSVKG

SEQ ID NO: 2370 - protein, 16 aa, synthetic construct
  REGION 1..16: note = Description of Artificial Sequence: Synthetic peptide
GISSDGSRVYADSVKG

SEQ ID NO: 2371 - protein, 16 aa, synthetic construct
  REGION 1..16: note = Description of Artificial Sequence: Synthetic peptide
GISSDGSKVYNDSVKG

SEQ ID NO: 2372 - protein, 16 aa, synthetic construct
  REGION 1..16: note = Description of Artificial Sequence: Synthetic peptide
GISSDGSKVYADSVKG

SEQ ID NO: 2373 - protein, 16 aa, synthetic construct
  REGION 1..16: note = Description of Artificial Sequence: Synthetic peptide
GISSDGSKVYVDSVKG

SEQ ID NO: 2374 - protein, 16 aa, synthetic construct
  REGION 1..16: note = Description of Artificial Sequence: Synthetic peptide
GISSDGSKLYADSVKG

SEQ ID NO: 2375 - protein, 16 aa, synthetic construct
  REGION 1..16: note = Description of Artificial Sequence: Synthetic peptide
GISSDGSKVYKDSVKG

SEQ ID NO: 2376 - protein, 16 aa, synthetic construct
  REGION 1..16: note = Description of Artificial Sequence: Synthetic peptide
GISSDGSKVYADSVKG

SEQ ID NO: 2377 - protein, 16 aa, synthetic construct
  REGION 1..16: note = Description of Artificial Sequence: Synthetic peptide
GISSDGSKVYQDSVKG

SEQ ID NO: 2378 - protein, 16 aa, synthetic construct
  REGION 1..16: note = Description of Artificial Sequence: Synthetic peptide
GISSDGTKIYADSAKV

SEQ ID NO: 2379 - protein, 16 aa, synthetic construct
  REGION 1..16: note = Description of Artificial Sequence: Synthetic peptide
GISSDRSKVYADSVKG

SEQ ID NO: 2380 - protein, 16 aa, synthetic construct
  REGION 1..16: note = Description of Artificial Sequence: Synthetic peptide
GISSDGSLVYADSVKG

SEQ ID NO: 2381 - protein, 16 aa, synthetic construct
  REGION 1..16: note = Description of Artificial Sequence: Synthetic peptide
GISSDGSKVYADSVKG

SEQ ID NO: 2382 - protein, 16 aa, synthetic construct
  REGION 1..16: note = Description of Artificial Sequence: Synthetic peptide
GISSDGSKVYRDSVKG

SEQ ID NO: 2383 - protein, 16 aa, synthetic construct
  REGION 1..16: note = Description of Artificial Sequence: Synthetic peptide
GISSDGSKVYADSVKG

SEQ ID NO: 2384 - protein, 16 aa, synthetic construct
  REGION 1..16: note = Description of Artificial Sequence: Synthetic peptide
GISSDGSKVYSDSVKG

SEQ ID NO: 2385 - protein, 16 aa, synthetic construct
  REGION 1..16: note = Description of Artificial Sequence: Synthetic peptide
GISSDGTKVYRDSVKG

SEQ ID NO: 2386 - protein, 16 aa, synthetic construct
  REGION 1..16: note = Description of Artificial Sequence: Synthetic peptide
GISSDGSKVYNDSVKG

SEQ ID NO: 2387 - protein, 16 aa, synthetic construct
  REGION 1..16: note = Description of Artificial Sequence: Synthetic peptide
GISSDGSKVYADSVKG

SEQ ID NO: 2388 - protein, 16 aa, synthetic construct
  REGION 1..16: note = Description of Artificial Sequence: Synthetic peptide
GISSDGSKVYADSVKG

SEQ ID NO: 2389 - protein, 16 aa, synthetic construct
  REGION 1..16: note = Description of Artificial Sequence: Synthetic peptide
GISSDGSKVYTDSVKG

SEQ ID NO: 2390 - protein, 16 aa, synthetic construct
  REGION 1..16: note = Description of Artificial Sequence: Synthetic peptide
GISPDGTKAYADSAKV

SEQ ID NO: 2391 - protein, 16 aa, synthetic construct
  REGION 1..16: note = Description of Artificial Sequence: Synthetic peptide
GISSDGSKVYVDSVKG

SEQ ID NO: 2392 - protein, 16 aa, synthetic construct
  REGION 1..16: note = Description of Artificial Sequence: Synthetic peptide
GISSDGSKVYSDSVKG

SEQ ID NO: 2393 - protein, 16 aa, synthetic construct
  REGION 1..16: note = Description of Artificial Sequence: Synthetic peptide
GISSDGSKVYASSVKG

SEQ ID NO: 2394 - protein, 16 aa, synthetic construct
  REGION 1..16: note = Description of Artificial Sequence: Synthetic peptide
GISADGSKVYADSVKG

SEQ ID NO: 2395 - protein, 16 aa, synthetic construct
  REGION 1..16: note = Description of Artificial Sequence: Synthetic peptide
GISSDGSKVYASSAKG

SEQ ID NO: 2396 - protein, 16 aa, synthetic construct
  REGION 1..16: note = Description of Artificial Sequence: Synthetic peptide
GISSDGSKVYADSVKG

SEQ ID NO: 2397 - protein, 16 aa, synthetic construct
  REGION 1..16: note = Description of Artificial Sequence: Synthetic peptide
GISSDGSSVYADSVKG

SEQ ID NO: 2398 - protein, 16 aa, synthetic construct
  REGION 1..16: note = Description of Artificial Sequence: Synthetic peptide
GISSDGSKVYSDSVKG

SEQ ID NO: 2399 - protein, 16 aa, synthetic construct
  REGION 1..16: note = Description of Artificial Sequence: Synthetic peptide
GISSDGSKVYAGSVKG

SEQ ID NO: 2400 - protein, 16 aa, synthetic construct
  REGION 1..16: note = Description of Artificial Sequence: Synthetic peptide
GISSDNSKVYADSVKG

SEQ ID NO: 2401 - protein, 16 aa, synthetic construct
  REGION 1..16: note = Description of Artificial Sequence: Synthetic peptide
GISSDGSAVYADSVKG

SEQ ID NO: 2402 - protein, 16 aa, synthetic construct
  REGION 1..16: note = Description of Artificial Sequence: Synthetic peptide
GISSDGSSVYADSVKG

SEQ ID NO: 2403 - protein, 16 aa, synthetic construct
  REGION 1..16: note = Description of Artificial Sequence: Synthetic peptide
GISSNGTKVYADSAKV

SEQ ID NO: 2404 - protein, 16 aa, synthetic construct
  REGION 1..16: note = Description of Artificial Sequence: Synthetic peptide
GISSDGSKLYADSVKG

SEQ ID NO: 2405 - protein, 16 aa, synthetic construct
  REGION 1..16: note = Description of Artificial Sequence: Synthetic peptide
GISSDGSKVYKDSVKG

SEQ ID NO: 2406 - protein, 16 aa, synthetic construct
  REGION 1..16: note = Description of Artificial Sequence: Synthetic peptide
GISSDGSLVYADSVKG

SEQ ID NO: 2407 - protein, 16 aa, synthetic construct
  REGION 1..16: note = Description of Artificial Sequence: Synthetic peptide
GISSDGSLVYADSVKG

SEQ ID NO: 2408 - protein, 16 aa, synthetic construct
  REGION 1..16: note = Description of Artificial Sequence: Synthetic peptide
GISSDGSKVYADSVKG

SEQ ID NO: 2409 - protein, 16 aa, synthetic construct
  REGION 1..16: note = Description of Artificial Sequence: Synthetic peptide
GISSDGSKVYADSVKG

SEQ ID NO: 2410 - protein, 16 aa, synthetic construct
  REGION 1..16: note = Description of Artificial Sequence: Synthetic peptide
GVSSDGSKVYADSVKG

SEQ ID NO: 2411 - protein, 16 aa, synthetic construct
  REGION 1..16: note = Description of Artificial Sequence: Synthetic peptide
GISRDGSKVYADSVKG

SEQ ID NO: 2412 - protein, 16 aa, synthetic construct
  REGION 1..16: note = Description of Artificial Sequence: Synthetic peptide
GISSDGSKLYADSVKG

SEQ ID NO: 2413 - protein, 16 aa, synthetic construct
  REGION 1..16: note = Description of Artificial Sequence: Synthetic peptide
GISSDGSKVYADSVKG

SEQ ID NO: 2414 - protein, 16 aa, synthetic construct
  REGION 1..16: note = Description of Artificial Sequence: Synthetic peptide
GISSDGSKVYADSVKG

SEQ ID NO: 2415 - protein, 16 aa, synthetic construct
  REGION 1..16: note = Description of Artificial Sequence: Synthetic peptide
GISSDGSKVYADSVKG

SEQ ID NO: 2416 - protein, 16 aa, synthetic construct
  REGION 1..16: note = Description of Artificial Sequence: Synthetic peptide
GISSDTSKVYADSVKG

SEQ ID NO: 2417 - protein, 16 aa, synthetic construct
  REGION 1..16: note = Description of Artificial Sequence: Synthetic peptide
GISSDGSKVYADSVKG

SEQ ID NO: 2418 - protein, 16 aa, synthetic construct
  REGION 1..16: note = Description of Artificial Sequence: Synthetic peptide
GISSDGSTVYADSVKG

SEQ ID NO: 2419 - protein, 16 aa, synthetic construct
  REGION 1..16: note = Description of Artificial Sequence: Synthetic peptide
GISKDGSKVYADSAKG

SEQ ID NO: 2420 - protein, 16 aa, synthetic construct
  REGION 1..16: note = Description of Artificial Sequence: Synthetic peptide
GISSDGSKVYSDSVKG

SEQ ID NO: 2421 - protein, 16 aa, synthetic construct
  REGION 1..16: note = Description of Artificial Sequence: Synthetic peptide
GISSDGSKVYSDSVKG

SEQ ID NO: 2422 - protein, 16 aa, synthetic construct
  REGION 1..16: note = Description of Artificial Sequence: Synthetic peptide
GISADGSTDYIDSVKG

SEQ ID NO: 2423 - protein, 16 aa, synthetic construct
  REGION 1..16: note = Description of Artificial Sequence: Synthetic peptide
GISADGSTAYIDSVKG

SEQ ID NO: 2424 - protein, 16 aa, synthetic construct
  REGION 1..16: note = Description of Artificial Sequence: Synthetic peptide
GISRDGSTDYIDSVKG

SEQ ID NO: 2425 - protein, 16 aa, synthetic construct
  REGION 1..16: note = Description of Artificial Sequence: Synthetic peptide
GISRDGSTDYIDSVKG

SEQ ID NO: 2426 - protein, 16 aa, synthetic construct
  REGION 1..16: note = Description of Artificial Sequence: Synthetic peptide
GISEAGSTDYIDSVKG

SEQ ID NO: 2427 - protein, 16 aa, synthetic construct
  REGION 1..16: note = Description of Artificial Sequence: Synthetic peptide
GISADGSTDYVDSVKG

SEQ ID NO: 2428 - protein, 16 aa, synthetic construct
  REGION 1..16: note = Description of Artificial Sequence: Synthetic peptide
GISADGSTDYIRSVKG

SEQ ID NO: 2429 - protein, 16 aa, synthetic construct
  REGION 1..16: note = Description of Artificial Sequence: Synthetic peptide
GISADGSVDYIDSVKG

SEQ ID NO: 2430 - protein, 16 aa, synthetic construct
  REGION 1..16: note = Description of Artificial Sequence: Synthetic peptide
GISADGSTLYIDSVKG

SEQ ID NO: 2431 - protein, 16 aa, synthetic construct
  REGION 1..16: note = Description of Artificial Sequence: Synthetic peptide
GISTDGSTDYIDSVKG

SEQ ID NO: 2432 - protein, 16 aa, synthetic construct
  REGION 1..16: note = Description of Artificial Sequence: Synthetic peptide
GISGDGSTDYIDSVKG

SEQ ID NO: 2433 - protein, 16 aa, synthetic construct
  REGION 1..16: note = Description of Artificial Sequence: Synthetic peptide
GISADGSTDYINSVKG

SEQ ID NO: 2434 - protein, 16 aa, synthetic construct
  REGION 1..16: note = Description of Artificial Sequence: Synthetic peptide
GISARGSTDYIDSVKG

SEQ ID NO: 2435 - protein, 16 aa, synthetic construct
  REGION 1..16: note = Description of Artificial Sequence: Synthetic peptide
GISADGSTTYIDSVKG

SEQ ID NO: 2436 - protein, 16 aa, synthetic construct
  REGION 1..16: note = Description of Artificial Sequence: Synthetic peptide
GISKDGSTDYIDSVKG

SEQ ID NO: 2437 - protein, 16 aa, synthetic construct
  REGION 1..16: note = Description of Artificial Sequence: Synthetic peptide
GISADGSTTYIDSVKG

SEQ ID NO: 2438 - protein, 16 aa, synthetic construct
  REGION 1..16: note = Description of Artificial Sequence: Synthetic peptide
GISANGSTDYIDSVKG

SEQ ID NO: 2439 - protein, 16 aa, synthetic construct
  REGION 1..16: note = Description of Artificial Sequence: Synthetic peptide
GISRDGSTDYIDSVKG

SEQ ID NO: 2440 - protein, 16 aa, synthetic construct
  REGION 1..16: note = Description of Artificial Sequence: Synthetic peptide
GISADGSADYIDSVKG

SEQ ID NO: 2441 - protein, 16 aa, synthetic construct
  REGION 1..16: note = Description of Artificial Sequence: Synthetic peptide
GISAHGSTDYIDSVKG

SEQ ID NO: 2442 - protein, 16 aa, synthetic construct
  REGION 1..16: note = Description of Artificial Sequence: Synthetic peptide
GISADGSTIYIDSVKG

SEQ ID NO: 2443 - protein, 16 aa, synthetic construct
  REGION 1..16: note = Description of Artificial Sequence: Synthetic peptide
GISRDGSTVYIDSVKG

SEQ ID NO: 2444 - protein, 16 aa, synthetic construct
  REGION 1..16: note = Description of Artificial Sequence: Synthetic peptide
GISADGPTDYIDSVKG

SEQ ID NO: 2445 - protein, 16 aa, synthetic construct
  REGION 1..16: note = Description of Artificial Sequence: Synthetic peptide
GISADGSTTYIDSVKG

SEQ ID NO: 2446 - protein, 16 aa, synthetic construct
  REGION 1..16: note = Description of Artificial Sequence: Synthetic peptide
GISADGSTDYIASVKG

SEQ ID NO: 2447 - protein, 16 aa, synthetic construct
  REGION 1..16: note = Description of Artificial Sequence: Synthetic peptide
GISLDGSTDYIDSVKG

SEQ ID NO: 2448 - protein, 16 aa, synthetic construct
  REGION 1..16: note = Description of Artificial Sequence: Synthetic peptide
GISADGSTIYIDSVKG

SEQ ID NO: 2449 - protein, 16 aa, synthetic construct
  REGION 1..16: note = Description of Artificial Sequence: Synthetic peptide
GISAHGSTDYIDSVKG

SEQ ID NO: 2450 - protein, 16 aa, synthetic construct
  REGION 1..16: note = Description of Artificial Sequence: Synthetic peptide
GISRDGSTDYIDSVKG

SEQ ID NO: 2451 - protein, 16 aa, synthetic construct
  REGION 1..16: note = Description of Artificial Sequence: Synthetic peptide
GISRDGSTDYIDSVKG

SEQ ID NO: 2452 - protein, 16 aa, synthetic construct
  REGION 1..16: note = Description of Artificial Sequence: Synthetic peptide
GISADGSMDYIDSVKG

SEQ ID NO: 2453 - protein, 16 aa, synthetic construct
  REGION 1..16: note = Description of Artificial Sequence: Synthetic peptide
GISADGSTDYIDSVKG

SEQ ID NO: 2454 - protein, 16 aa, synthetic construct
  REGION 1..16: note = Description of Artificial Sequence: Synthetic peptide
GISADGSTDYIDSVKG

SEQ ID NO: 2455 - protein, 16 aa, synthetic construct
  REGION 1..16: note = Description of Artificial Sequence: Synthetic peptide
GISANGSTDYIDSVKG

SEQ ID NO: 2456 - protein, 16 aa, synthetic construct
  REGION 1..16: note = Description of Artificial Sequence: Synthetic peptide
GISANGSTTYIDSVKG

SEQ ID NO: 2457 - protein, 16 aa, synthetic construct
  REGION 1..16: note = Description of Artificial Sequence: Synthetic peptide
GISADGSTSYIDSVKG

SEQ ID NO: 2458 - protein, 16 aa, synthetic construct
  REGION 1..16: note = Description of Artificial Sequence: Synthetic peptide
GISADGSRDYIDSVKG

SEQ ID NO: 2459 - protein, 16 aa, synthetic construct
  REGION 1..16: note = Description of Artificial Sequence: Synthetic peptide
GISADGSTMYIDSVKG

SEQ ID NO: 2460 - protein, 16 aa, synthetic construct
  REGION 1..16: note = Description of Artificial Sequence: Synthetic peptide
GISPDGSTDYIDSVKG

SEQ ID NO: 2461 - protein, 16 aa, synthetic construct
  REGION 1..16: note = Description of Artificial Sequence: Synthetic peptide
GISGDGSTDYIDSVKG

SEQ ID NO: 2462 - protein, 16 aa, synthetic construct
  REGION 1..16: note = Description of Artificial Sequence: Synthetic peptide
GISRDGSTDYIDSVKG

SEQ ID NO: 2463 - protein, 16 aa, synthetic construct
  REGION 1..16: note = Description of Artificial Sequence: Synthetic peptide
GISRDGSTDYIDSVKG

SEQ ID NO: 2464 - protein, 16 aa, synthetic construct
  REGION 1..16: note = Description of Artificial Sequence: Synthetic peptide
GISRDGSTDYIDSVKG

SEQ ID NO: 2465 - protein, 16 aa, synthetic construct
  REGION 1..16: note = Description of Artificial Sequence: Synthetic peptide
GISADGSTDYIDSVKG

SEQ ID NO: 2466 - protein, 16 aa, synthetic construct
  REGION 1..16: note = Description of Artificial Sequence: Synthetic peptide
GISTDGSTDYIDSVKG

SEQ ID NO: 2467 - protein, 16 aa, synthetic construct
  REGION 1..16: note = Description of Artificial Sequence: Synthetic peptide
GISADGSTSYIDSVKG

SEQ ID NO: 2468 - protein, 16 aa, synthetic construct
  REGION 1..16: note = Description of Artificial Sequence: Synthetic peptide
GISADGSTLYIDSVKG

SEQ ID NO: 2469 - protein, 16 aa, synthetic construct
  REGION 1..16: note = Description of Artificial Sequence: Synthetic peptide
GISRDGSTDYIDSVKG

SEQ ID NO: 2470 - protein, 16 aa, synthetic construct
  REGION 1..16: note = Description of Artificial Sequence: Synthetic peptide
GISADGSTVYIDSVKG

SEQ ID NO: 2471 - protein, 16 aa, synthetic construct
  REGION 1..16: note = Description of Artificial Sequence: Synthetic peptide
GISTDGSTDYIDSVKG

SEQ ID NO: 2472 - protein, 16 aa, synthetic construct
  REGION 1..16: note = Description of Artificial Sequence: Synthetic peptide
GISADGSTLYIDSVKG

SEQ ID NO: 2473 - protein, 16 aa, synthetic construct
  REGION 1..16: note = Description of Artificial Sequence: Synthetic peptide
GISADGRTDYIDSVKG

SEQ ID NO: 2474 - protein, 16 aa, synthetic construct
  REGION 1..16: note = Description of Artificial Sequence: Synthetic peptide
GISADGSTIYIDSVKG

SEQ ID NO: 2475 - protein, 16 aa, synthetic construct
  REGION 1..16: note = Description of Artificial Sequence: Synthetic peptide
GISADGSTLYIDSVKG

SEQ ID NO: 2476 - protein, 16 aa, synthetic construct
  REGION 1..16: note = Description of Artificial Sequence: Synthetic peptide
GISRDGSTDYIDSVKG

SEQ ID NO: 2477 - protein, 16 aa, synthetic construct
  REGION 1..16: note = Description of Artificial Sequence: Synthetic peptide
GISKDGSTDYIDSVKG

SEQ ID NO: 2478 - protein, 16 aa, synthetic construct
  REGION 1..16: note = Description of Artificial Sequence: Synthetic peptide
GISADGSTDYIGSVKG

SEQ ID NO: 2479 - protein, 16 aa, synthetic construct
  REGION 1..16: note = Description of Artificial Sequence: Synthetic peptide
GISVDGSTDYIDSVKG

SEQ ID NO: 2480 - protein, 16 aa, synthetic construct
  REGION 1..16: note = Description of Artificial Sequence: Synthetic peptide
GISADGSTGYIDSVKG

SEQ ID NO: 2481 - protein, 16 aa, synthetic construct
  REGION 1..16: note = Description of Artificial Sequence: Synthetic peptide
GISGDGSTTYIDSVKG

SEQ ID NO: 2482 - protein, 16 aa, synthetic construct
  REGION 1..16: note = Description of Artificial Sequence: Synthetic peptide
GISTDGSTDYIDSVKG

SEQ ID NO: 2483 - protein, 16 aa, synthetic construct
  REGION 1..16: note = Description of Artificial Sequence: Synthetic peptide
GISADGSTDYFDSVKG

SEQ ID NO: 2484 - protein, 16 aa, synthetic construct
  REGION 1..16: note = Description of Artificial Sequence: Synthetic peptide
GISADGSTSYIDSVKG

SEQ ID NO: 2485 - protein, 16 aa, synthetic construct
  REGION 1..16: note = Description of Artificial Sequence: Synthetic peptide
GISADGSTDYIDSVKG

SEQ ID NO: 2486 - protein, 16 aa, synthetic construct
  REGION 1..16: note = Description of Artificial Sequence: Synthetic peptide
GISADGSTAYIDSVKG

SEQ ID NO: 2487 - protein, 16 aa, synthetic construct
  REGION 1..16: note = Description of Artificial Sequence: Synthetic peptide
GISADGSTVYIDSVKG

SEQ ID NO: 2488 - protein, 16 aa, synthetic construct
  REGION 1..16: note = Description of Artificial Sequence: Synthetic peptide
GISQDGSTDYIDSVKG

SEQ ID NO: 2489 - protein, 16 aa, synthetic construct
  REGION 1..16: note = Description of Artificial Sequence: Synthetic peptide
GISNDGSTDYIDSVKG

SEQ ID NO: 2490 - protein, 16 aa, synthetic construct
  REGION 1..16: note = Description of Artificial Sequence: Synthetic peptide
GISARGSTDYIDSVKG

SEQ ID NO: 2491 - protein, 16 aa, synthetic construct
  REGION 1..16: note = Description of Artificial Sequence: Synthetic peptide
GISADGSTDYIDSVKG

SEQ ID NO: 2492 - protein, 16 aa, synthetic construct
  REGION 1..16: note = Description of Artificial Sequence: Synthetic peptide
GISRDGSTDYIDSVKG

SEQ ID NO: 2493 - protein, 16 aa, synthetic construct
  REGION 1..16: note = Description of Artificial Sequence: Synthetic peptide
GISADGSTLYIDSVKG

SEQ ID NO: 2494 - protein, 16 aa, synthetic construct
  REGION 1..16: note = Description of Artificial Sequence: Synthetic peptide
GISADGSTNYIDSVKG

SEQ ID NO: 2495 - protein, 16 aa, synthetic construct
  REGION 1..16: note = Description of Artificial Sequence: Synthetic peptide
GISADGSTVYIDSVKG

SEQ ID NO: 2496 - protein, 16 aa, synthetic construct
  REGION 1..16: note = Description of Artificial Sequence: Synthetic peptide
GISADGSTTYIDSVKG

SEQ ID NO: 2497 - protein, 16 aa, synthetic construct
  REGION 1..16: note = Description of Artificial Sequence: Synthetic peptide
GISADGSTDYIGSVKG

SEQ ID NO: 2498 - protein, 16 aa, synthetic construct
  REGION 1..16: note = Description of Artificial Sequence: Synthetic peptide
GISRDGSTDYIDSVKG

SEQ ID NO: 2499 - protein, 16 aa, synthetic construct
  REGION 1..16: note = Description of Artificial Sequence: Synthetic peptide
GISADGSTTYIDSVKG

SEQ ID NO: 2500 - protein, 16 aa, synthetic construct
  REGION 1..16: note = Description of Artificial Sequence: Synthetic peptide
GVSSDGSTDYIDSVKG

SEQ ID NO: 2501 - protein, 16 aa, synthetic construct
  REGION 1..16: note = Description of Artificial Sequence: Synthetic peptide
GISADGHTDYIDSVKG

SEQ ID NO: 2502 - protein, 16 aa, synthetic construct
  REGION 1..16: note = Description of Artificial Sequence: Synthetic peptide
GISADGSTDYFDSVKG

SEQ ID NO: 2503 - protein, 16 aa, synthetic construct
  REGION 1..16: note = Description of Artificial Sequence: Synthetic peptide
GISADGSTVYIDSVKG

SEQ ID NO: 2504 - protein, 16 aa, synthetic construct
  REGION 1..16: note = Description of Artificial Sequence: Synthetic peptide
GISADGSTDYIASVKG

SEQ ID NO: 2505 - protein, 16 aa, synthetic construct
  REGION 1..16: note = Description of Artificial Sequence: Synthetic peptide
GISADGSTDYISSVKG

SEQ ID NO: 2506 - protein, 16 aa, synthetic construct
  REGION 1..16: note = Description of Artificial Sequence: Synthetic peptide
GISADGSTVYIDSVKG

SEQ ID NO: 2507 - protein, 16 aa, synthetic construct
  REGION 1..16: note = Description of Artificial Sequence: Synthetic peptide
GISADGSTVYIDSVKG

SEQ ID NO: 2508 - protein, 16 aa, synthetic construct
  REGION 1..16: note = Description of Artificial Sequence: Synthetic peptide
GISADGSTTYIDSVKG

SEQ ID NO: 2509 - protein, 16 aa, synthetic construct
  REGION 1..16: note = Description of Artificial Sequence: Synthetic peptide
GISVDGSTDYIDSVKG

SEQ ID NO: 2510 - protein, 16 aa, synthetic construct
  REGION 1..16: note = Description of Artificial Sequence: Synthetic peptide
GISADGSTAYIDSVKG

SEQ ID NO: 2511 - protein, 16 aa, synthetic construct
  REGION 1..16: note = Description of Artificial Sequence: Synthetic peptide
GISADGSTAYIDSVKG

SEQ ID NO: 2512 - protein, 16 aa, synthetic construct
  REGION 1..16: note = Description of Artificial Sequence: Synthetic peptide
GISADGSKDYIDSVKG

SEQ ID NO: 2513 - protein, 16 aa, synthetic construct
  REGION 1..16: note = Description of Artificial Sequence: Synthetic peptide
GISADGSTDYFDSVKG

SEQ ID NO: 2514 - protein, 16 aa, synthetic construct
  REGION 1..16: note = Description of Artificial Sequence: Synthetic peptide
GISADGSTDYIDSVKG

SEQ ID NO: 2515 - protein, 16 aa, synthetic construct
  REGION 1..16: note = Description of Artificial Sequence: Synthetic peptide
GISADGSTVYIDSVKG

SEQ ID NO: 2516 - protein, 16 aa, synthetic construct
  REGION 1..16: note = Description of Artificial Sequence: Synthetic peptide
GISADGSTVYIDSVKG

SEQ ID NO: 2517 - protein, 16 aa, synthetic construct
  REGION 1..16: note = Description of Artificial Sequence: Synthetic peptide
GISARGSTDYIDSVKG

SEQ ID NO: 2518 - protein, 16 aa, synthetic construct
  REGION 1..16: note = Description of Artificial Sequence: Synthetic peptide
GISATGSTDYIDSVKG

SEQ ID NO: 2519 - protein, 16 aa, synthetic construct
  REGION 1..16: note = Description of Artificial Sequence: Synthetic peptide
GISKDGSTDYIDSVKG

SEQ ID NO: 2520 - protein, 16 aa, synthetic construct
  REGION 1..16: note = Description of Artificial Sequence: Synthetic peptide
GISADGSTVYIDSVKG

SEQ ID NO: 2521 - protein, 16 aa, synthetic construct
  REGION 1..16: note = Description of Artificial Sequence: Synthetic peptide
GISPDGSTDYIDSVKG

SEQ ID NO: 2522 - protein, 16 aa, synthetic construct
  REGION 1..16: note = Description of Artificial Sequence: Synthetic peptide
GISADGSTHYIDSVKG

SEQ ID NO: 2523 - protein, 16 aa, synthetic construct
  REGION 1..16: note = Description of Artificial Sequence: Synthetic peptide
GISADGSTDYILSVKG

SEQ ID NO: 2524 - protein, 16 aa, synthetic construct
  REGION 1..16: note = Description of Artificial Sequence: Synthetic peptide
GISADGSTDYIHSVKG

SEQ ID NO: 2525 - protein, 16 aa, synthetic construct
  REGION 1..16: note = Description of Artificial Sequence: Synthetic peptide
GISVDGSTDYIDSVKG

SEQ ID NO: 2526 - protein, 16 aa, synthetic construct
  REGION 1..16: note = Description of Artificial Sequence: Synthetic peptide
GISRDGSTDYIDSVKG

SEQ ID NO: 2527 - protein, 16 aa, synthetic construct
  REGION 1..16: note = Description of Artificial Sequence: Synthetic peptide
GISADGSTVYIDSVKG

SEQ ID NO: 2528 - protein, 16 aa, synthetic construct
  REGION 1..16: note = Description of Artificial Sequence: Synthetic peptide
GISADGSTDYIRSVKG

SEQ ID NO: 2529 - protein, 16 aa, synthetic construct
  REGION 1..16: note = Description of Artificial Sequence: Synthetic peptide
GISADGSTMYIDSVKG

SEQ ID NO: 2530 - protein, 16 aa, synthetic construct
  REGION 1..16: note = Description of Artificial Sequence: Synthetic peptide
GISTDGSTDYIDSVKG

SEQ ID NO: 2531 - protein, 16 aa, synthetic construct
  REGION 1..16: note = Description of Artificial Sequence: Synthetic peptide
GISADGSTLYIDSVKG

SEQ ID NO: 2532 - protein, 16 aa, synthetic construct
  REGION 1..16: note = Description of Artificial Sequence: Synthetic peptide
GISADGSTDYIDSVKG

SEQ ID NO: 2533 - protein, 16 aa, synthetic construct
  REGION 1..16: note = Description of Artificial Sequence: Synthetic peptide
GISATGSTDYIDSVKG

SEQ ID NO: 2534 - protein, 16 aa, synthetic construct
  REGION 1..16: note = Description of Artificial Sequence: Synthetic peptide
GISHDGSTDYIDSVKG

SEQ ID NO: 2535 - protein, 16 aa, synthetic construct
  REGION 1..16: note = Description of Artificial Sequence: Synthetic peptide
GISYDGSTDYIDSVKG

SEQ ID NO: 2536 - protein, 16 aa, synthetic construct
  REGION 1..16: note = Description of Artificial Sequence: Synthetic peptide
GISTDGSTDYIDSVKG

SEQ ID NO: 2537 - protein, 16 aa, synthetic construct
  REGION 1..16: note = Description of Artificial Sequence: Synthetic peptide
GISADGSTAYIDSVKG

SEQ ID NO: 2538 - protein, 16 aa, synthetic construct
  REGION 1..16: note = Description of Artificial Sequence: Synthetic peptide
GISADGSTDYIESVKG

SEQ ID NO: 2539 - protein, 16 aa, synthetic construct
  REGION 1..16: note = Description of Artificial Sequence: Synthetic peptide
GISIDGSTDYIKSVKG

SEQ ID NO: 2540 - protein, 16 aa, synthetic construct
  REGION 1..16: note = Description of Artificial Sequence: Synthetic peptide
GISADGSKDYIDSVKG

SEQ ID NO: 2541 - protein, 16 aa, synthetic construct
  REGION 1..16: note = Description of Artificial Sequence: Synthetic peptide
GISADGSTVYIDSVKG

SEQ ID NO: 2542 - protein, 16 aa, synthetic construct
  REGION 1..16: note = Description of Artificial Sequence: Synthetic peptide
GISRDGSTDYIDSVKG

SEQ ID NO: 2543 - protein, 16 aa, synthetic construct
  REGION 1..16: note = Description of Artificial Sequence: Synthetic peptide
GISADGSTDYIHSVKG

SEQ ID NO: 2544 - protein, 16 aa, synthetic construct
  REGION 1..16: note = Description of Artificial Sequence: Synthetic peptide
GISADGSTIYIDSVKG

SEQ ID NO: 2545 - protein, 16 aa, synthetic construct
  REGION 1..16: note = Description of Artificial Sequence: Synthetic peptide
GISANGSTDYIDSVKG

SEQ ID NO: 2546 - protein, 16 aa, synthetic construct
  REGION 1..16: note = Description of Artificial Sequence: Synthetic peptide
GISTDGSTDYIDSVKG

SEQ ID NO: 2547 - protein, 16 aa, synthetic construct
  REGION 1..16: note = Description of Artificial Sequence: Synthetic peptide
GISYDGSTDYIDSVKG

SEQ ID NO: 2548 - protein, 16 aa, synthetic construct
  REGION 1..16: note = Description of Artificial Sequence: Synthetic peptide
GISADGSTDYIASVKG

SEQ ID NO: 2549 - protein, 16 aa, synthetic construct
  REGION 1..16: note = Description of Artificial Sequence: Synthetic peptide
GISADGSTDYIGSVKG

SEQ ID NO: 2550 - protein, 16 aa, synthetic construct
  REGION 1..16: note = Description of Artificial Sequence: Synthetic peptide
GISANGSTDYYDSVKG

SEQ ID NO: 2551 - protein, 16 aa, synthetic construct
  REGION 1..16: note = Description of Artificial Sequence: Synthetic peptide
GISADGSTSYIDSVKG

SEQ ID NO: 2552 - protein, 16 aa, synthetic construct
  REGION 1..16: note = Description of Artificial Sequence: Synthetic peptide
GVSADGSTDYIDSVKG

SEQ ID NO: 2553 - protein, 16 aa, synthetic construct
  REGION 1..16: note = Description of Artificial Sequence: Synthetic peptide
GISARGSTDYIDSVKG

SEQ ID NO: 2554 - protein, 16 aa, synthetic construct
  REGION 1..16: note = Description of Artificial Sequence: Synthetic peptide
GISADGSTIYIDSVKG

SEQ ID NO: 2555 - protein, 16 aa, synthetic construct
  REGION 1..16: note = Description of Artificial Sequence: Synthetic peptide
GISANGSTDYIDSVKG

SEQ ID NO: 2556 - protein, 16 aa, synthetic construct
  REGION 1..16: note = Description of Artificial Sequence: Synthetic peptide
GISADGSTDYVDSVKG

SEQ ID NO: 2557 - protein, 16 aa, synthetic construct
  REGION 1..16: note = Description of Artificial Sequence: Synthetic peptide
GISADGSTDYRDSVKG

SEQ ID NO: 2558 - protein, 16 aa, synthetic construct
  REGION 1..16: note = Description of Artificial Sequence: Synthetic peptide
GISVDGSTDYIDSVKG

SEQ ID NO: 2559 - protein, 16 aa, synthetic construct
  REGION 1..16: note = Description of Artificial Sequence: Synthetic peptide
GISADGSTDYILSVKG

SEQ ID NO: 2560 - protein, 16 aa, synthetic construct
  REGION 1..16: note = Description of Artificial Sequence: Synthetic peptide
GISVDGSTDYIDSVKG

SEQ ID NO: 2561 - protein, 16 aa, synthetic construct
  REGION 1..16: note = Description of Artificial Sequence: Synthetic peptide
GISSDGSKVFNESVKG

SEQ ID NO: 2562 - protein, 16 aa, synthetic construct
  REGION 1..16: note = Description of Artificial Sequence: Synthetic peptide
GISSDGSEVYTDSVKG

SEQ ID NO: 2563 - protein, 16 aa, synthetic construct
  REGION 1..16: note = Description of Artificial Sequence: Synthetic peptide
GISSDDSNVYYESVKG

SEQ ID NO: 2564 - protein, 16 aa, synthetic construct
  REGION 1..16: note = Description of Artificial Sequence: Synthetic peptide
GISSDGSKVYADSVKG

SEQ ID NO: 2565 - protein, 16 aa, synthetic construct
  REGION 1..16: note = Description of Artificial Sequence: Synthetic peptide
GISSDESTLYVDSVKG

SEQ ID NO: 2566 - protein, 16 aa, synthetic construct
  REGION 1..16: note = Description of Artificial Sequence: Synthetic peptide
GISSDDSKVYSDSVKG

SEQ ID NO: 2567 - protein, 16 aa, synthetic construct
  REGION 1..16: note = Description of Artificial Sequence: Synthetic peptide
GISSDGSQVYGASVKG

SEQ ID NO: 2568 - protein, 16 aa, synthetic construct
  REGION 1..16: note = Description of Artificial Sequence: Synthetic peptide
GISSDGSKVYADSVKG

SEQ ID NO: 2569 - protein, 16 aa, synthetic construct
  REGION 1..16: note = Description of Artificial Sequence: Synthetic peptide
GISSDGSNMYADSVKG

SEQ ID NO: 2570 - protein, 16 aa, synthetic construct
  REGION 1..16: note = Description of Artificial Sequence: Synthetic peptide
GISSDGSKVYTDSVKG

SEQ ID NO: 2571 - protein, 16 aa, synthetic construct
  REGION 1..16: note = Description of Artificial Sequence: Synthetic peptide
GISSDGSKVSAESVKG

SEQ ID NO: 2572 - protein, 16 aa, synthetic construct
  REGION 1..16: note = Description of Artificial Sequence: Synthetic peptide
GISSDGSKVYDDSVKG

SEQ ID NO: 2573 - protein, 16 aa, synthetic construct
  REGION 1..16: note = Description of Artificial Sequence: Synthetic peptide
GISSDGSKVYDDSVKG

SEQ ID NO: 2574 - protein, 16 aa, synthetic construct
  REGION 1..16: note = Description of Artificial Sequence: Synthetic peptide
GISSDGSAVYVGSVKG

SEQ ID NO: 2575 - protein, 16 aa, synthetic construct
  REGION 1..16: note = Description of Artificial Sequence: Synthetic peptide
GISSDGSYVYSESVKG

SEQ ID NO: 2576 - protein, 16 aa, synthetic construct
  REGION 1..16: note = Description of Artificial Sequence: Synthetic peptide
GISSDSSHVYADSVKG

SEQ ID NO: 2577 - protein, 16 aa, synthetic construct
  REGION 1..16: note = Description of Artificial Sequence: Synthetic peptide
GISSDSSIVYTDSVKG

SEQ ID NO: 2578 - protein, 16 aa, synthetic construct
  REGION 1..16: note = Description of Artificial Sequence: Synthetic peptide
GISSDGSEVNTDSVKG

SEQ ID NO: 2579 - protein, 16 aa, synthetic construct
  REGION 1..16: note = Description of Artificial Sequence: Synthetic peptide
GISSDGSKLSSDSVKG

SEQ ID NO: 2580 - protein, 16 aa, synthetic construct
  REGION 1..16: note = Description of Artificial Sequence: Synthetic peptide
GISSDNSKVYADSVKG

SEQ ID NO: 2581 - protein, 16 aa, synthetic construct
  REGION 1..16: note = Description of Artificial Sequence: Synthetic peptide
GISSDGSRVYFDSVKG

SEQ ID NO: 2582 - protein, 16 aa, synthetic construct
  REGION 1..16: note = Description of Artificial Sequence: Synthetic peptide
GISSDGSLVYAESVKG

SEQ ID NO: 2583 - protein, 16 aa, synthetic construct
  REGION 1..16: note = Description of Artificial Sequence: Synthetic peptide
GISSDGSVVYVDSVKG

SEQ ID NO: 2584 - protein, 16 aa, synthetic construct
  REGION 1..16: note = Description of Artificial Sequence: Synthetic peptide
GISSDGSKVYVDSVKG

SEQ ID NO: 2585 - protein, 16 aa, synthetic construct
  REGION 1..16: note = Description of Artificial Sequence: Synthetic peptide
GISSDGSKLYDESVKG

SEQ ID NO: 2586 - protein, 16 aa, synthetic construct
  REGION 1..16: note = Description of Artificial Sequence: Synthetic peptide
GISSDYSKLYADSVKG

SEQ ID NO: 2587 - protein, 16 aa, synthetic construct
  REGION 1..16: note = Description of Artificial Sequence: Synthetic peptide
GISSDSSKVYTESVKG

SEQ ID NO: 2588 - protein, 16 aa, synthetic construct
  REGION 1..16: note = Description of Artificial Sequence: Synthetic peptide
GISSDGSQVYVDSVKG

SEQ ID NO: 2589 - protein, 16 aa, synthetic construct
  REGION 1..16: note = Description of Artificial Sequence: Synthetic peptide
GISSDGSKVYSDSVKG

SEQ ID NO: 2590 - protein, 16 aa, synthetic construct
  REGION 1..16: note = Description of Artificial Sequence: Synthetic peptide
GISSDGSKVYVDSVKG

SEQ ID NO: 2591 - protein, 16 aa, synthetic construct
  REGION 1..16: note = Description of Artificial Sequence: Synthetic peptide
GISSDGSKVYADSVKG

SEQ ID NO: 2592 - protein, 16 aa, synthetic construct
  REGION 1..16: note = Description of Artificial Sequence: Synthetic peptide
GISSDGSSVYADSVKG

SEQ ID NO: 2593 - protein, 16 aa, synthetic construct
  REGION 1..16: note = Description of Artificial Sequence: Synthetic peptide
GISSDGSQVYYGSVKG

SEQ ID NO: 2594 - protein, 16 aa, synthetic construct
  REGION 1..16: note = Description of Artificial Sequence: Synthetic peptide
GISSDGSKVYTDSVKG

SEQ ID NO: 2595 - protein, 16 aa, synthetic construct
  REGION 1..16: note = Description of Artificial Sequence: Synthetic peptide
GISSDGSKVSADSVKG

SEQ ID NO: 2596 - protein, 16 aa, synthetic construct
  REGION 1..16: note = Description of Artificial Sequence: Synthetic peptide
GISSDGSKVYEDSVKG

SEQ ID NO: 2597 - protein, 16 aa, synthetic construct
  REGION 1..16: note = Description of Artificial Sequence: Synthetic peptide
GISSDRSKVYADSVKG

SEQ ID NO: 2598 - protein, 16 aa, synthetic construct
  REGION 1..16: note = Description of Artificial Sequence: Synthetic peptide
GISSDGSKVYAESVKG

SEQ ID NO: 2599 - protein, 16 aa, synthetic construct
  REGION 1..16: note = Description of Artificial Sequence: Synthetic peptide
GISSDGSVVTTESVKG

SEQ ID NO: 2600 - protein, 16 aa, synthetic construct
  REGION 1..16: note = Description of Artificial Sequence: Synthetic peptide
GISSDGSHVHQESVKG

SEQ ID NO: 2601 - protein, 16 aa, synthetic construct
  REGION 1..16: note = Description of Artificial Sequence: Synthetic peptide
GISADGSTVYVESVKG

SEQ ID NO: 2602 - protein, 16 aa, synthetic construct
  REGION 1..16: note = Description of Artificial Sequence: Synthetic peptide
GISSDGSTVYIDSVKG

SEQ ID NO: 2603 - protein, 16 aa, synthetic construct
  REGION 1..16: note = Description of Artificial Sequence: Synthetic peptide
GISVDGSTHYVASVKG

SEQ ID NO: 2604 - protein, 16 aa, synthetic construct
  REGION 1..16: note = Description of Artificial Sequence: Synthetic peptide
GISTDGSKHYIDSVKG

SEQ ID NO: 2605 - protein, 16 aa, synthetic construct
  REGION 1..16: note = Description of Artificial Sequence: Synthetic peptide
GISYDGSKYYAESVKG

SEQ ID NO: 2606 - protein, 16 aa, synthetic construct
  REGION 1..16: note = Description of Artificial Sequence: Synthetic peptide
GISANGSRTYMESVKG

SEQ ID NO: 2607 - protein, 16 aa, synthetic construct
  REGION 1..16: note = Description of Artificial Sequence: Synthetic peptide
GISPDGSTDYVDSVKG

SEQ ID NO: 2608 - protein, 16 aa, synthetic construct
  REGION 1..16: note = Description of Artificial Sequence: Synthetic peptide
GISPNGSAVYTESVKG

SEQ ID NO: 2609 - protein, 16 aa, synthetic construct
  REGION 1..16: note = Description of Artificial Sequence: Synthetic peptide
GISPDGSTAYMESVKG

SEQ ID NO: 2610 - protein, 16 aa, synthetic construct
  REGION 1..16: note = Description of Artificial Sequence: Synthetic peptide
GISNDGSTDYIDSVKG

SEQ ID NO: 2611 - protein, 16 aa, synthetic construct
  REGION 1..16: note = Description of Artificial Sequence: Synthetic peptide
GISTDGSAVYFDSVKG

SEQ ID NO: 2612 - protein, 16 aa, synthetic construct
  REGION 1..16: note = Description of Artificial Sequence: Synthetic peptide
GISTGGSTHYIESVKG

SEQ ID NO: 2613 - protein, 16 aa, synthetic construct
  REGION 1..16: note = Description of Artificial Sequence: Synthetic peptide
GISTDGSTVYIDSVKG

SEQ ID NO: 2614 - protein, 16 aa, synthetic construct
  REGION 1..16: note = Description of Artificial Sequence: Synthetic peptide
GISNEGSTYYMDSVKG

SEQ ID NO: 2615 - protein, 16 aa, synthetic construct
  REGION 1..16: note = Description of Artificial Sequence: Synthetic peptide
GISADGSHVYTNSVKG

SEQ ID NO: 2616 - protein, 16 aa, synthetic construct
  REGION 1..16: note = Description of Artificial Sequence: Synthetic peptide
GISDDGSRYYTDSVKG

SEQ ID NO: 2617 - protein, 16 aa, synthetic construct
  REGION 1..16: note = Description of Artificial Sequence: Synthetic peptide
GISAEGSTLYMESVKG

SEQ ID NO: 2618 - protein, 16 aa, synthetic construct
  REGION 1..16: note = Description of Artificial Sequence: Synthetic peptide
GISTDGSTVYIDSVKG

SEQ ID NO: 2619 - protein, 16 aa, synthetic construct
  REGION 1..16: note = Description of Artificial Sequence: Synthetic peptide
GISANGSTSYIDSVKG

SEQ ID NO: 2620 - protein, 16 aa, synthetic construct
  REGION 1..16: note = Description of Artificial Sequence: Synthetic peptide
GISDDGSRHYIESVKG

SEQ ID NO: 2621 - protein, 16 aa, synthetic construct
  REGION 1..16: note = Description of Artificial Sequence: Synthetic peptide
GISPDGSTVYIESVKG

SEQ ID NO: 2622 - protein, 16 aa, synthetic construct
  REGION 1..16: note = Description of Artificial Sequence: Synthetic peptide
GISDDGSTVYVDSVKG

SEQ ID NO: 2623 - protein, 16 aa, synthetic construct
  REGION 1..16: note = Description of Artificial Sequence: Synthetic peptide
GISDDGSTVYFDSVKG

SEQ ID NO: 2624 - protein, 16 aa, synthetic construct
  REGION 1..16: note = Description of Artificial Sequence: Synthetic peptide
GISDEGSTVYIGSVKG

SEQ ID NO: 2625 - protein, 16 aa, synthetic construct
  REGION 1..16: note = Description of Artificial Sequence: Synthetic peptide
GISDDGSIVYMDSVKG

SEQ ID NO: 2626 - protein, 16 aa, synthetic construct
  REGION 1..16: note = Description of Artificial Sequence: Synthetic peptide
GISDDGSKHYFDSVKG

SEQ ID NO: 2627 - protein, 16 aa, synthetic construct
  REGION 1..16: note = Description of Artificial Sequence: Synthetic peptide
GISTDGSTDYLHSVKG

SEQ ID NO: 2628 - protein, 16 aa, synthetic construct
  REGION 1..16: note = Description of Artificial Sequence: Synthetic peptide
GISDDGSKHYFDSVKG

SEQ ID NO: 2629 - protein, 16 aa, synthetic construct
  REGION 1..16: note = Description of Artificial Sequence: Synthetic peptide
GISYDGSTVYVESVKG

SEQ ID NO: 2630 - protein, 16 aa, synthetic construct
  REGION 1..16: note = Description of Artificial Sequence: Synthetic peptide
GISDDGSTVYIDSVKG

SEQ ID NO: 2631 - protein, 16 aa, synthetic construct
  REGION 1..16: note = Description of Artificial Sequence: Synthetic peptide
GISDDGSTVYVDSVKG

SEQ ID NO: 2632 - protein, 16 aa, synthetic construct
  REGION 1..16: note = Description of Artificial Sequence: Synthetic peptide
GISDDGSQVYIDSVKG

SEQ ID NO: 2633 - protein, 16 aa, synthetic construct
  REGION 1..16: note = Description of Artificial Sequence: Synthetic peptide
GISVDGSTVYSDSVKG

SEQ ID NO: 2634 - protein, 16 aa, synthetic construct
  REGION 1..16: note = Description of Artificial Sequence: Synthetic peptide
GISDDGSNVYIDSVKG

SEQ ID NO: 2635 - protein, 16 aa, synthetic construct
  REGION 1..16: note = Description of Artificial Sequence: Synthetic peptide
GISTDGSTVYFVSVKG

SEQ ID NO: 2636 - protein, 16 aa, synthetic construct
  REGION 1..16: note = Description of Artificial Sequence: Synthetic peptide
GISTDGSTVYIDSVKG

SEQ ID NO: 2637 - protein, 7 aa, synthetic construct
  REGION 1..7: note = Description of Artificial Sequence: Synthetic peptide
RYFERTD

SEQ ID NO: 2638 - protein, 7 aa, synthetic construct
  REGION 1..7: note = Description of Artificial Sequence: Synthetic peptide
RYFERTD

SEQ ID NO: 2639 - protein, 7 aa, synthetic construct
  REGION 1..7: note = Description of Artificial Sequence: Synthetic peptide
RYFERTD

SEQ ID NO: 2640 - protein, 7 aa, synthetic construct
  REGION 1..7: note = Description of Artificial Sequence: Synthetic peptide
YQGLYAY

SEQ ID NO: 2641 - protein, 7 aa, synthetic construct
  REGION 1..7: note = Description of Artificial Sequence: Synthetic peptide
RVFDHVY

SEQ ID NO: 2642 - protein, 7 aa, synthetic construct
  REGION 1..7: note = Description of Artificial Sequence: Synthetic peptide
RAFGRDY

SEQ ID NO: 2643 - protein, 7 aa, synthetic construct
  REGION 1..7: note = Description of Artificial Sequence: Synthetic peptide
RTMGRDY

SEQ ID NO: 2644 - protein, 8 aa, synthetic construct
  REGION 1..8: note = Description of Artificial Sequence: Synthetic peptide
WDGVGGAY

SEQ ID NO: 2645 - protein, 8 aa, synthetic construct
  REGION 1..8: note = Description of Artificial Sequence: Synthetic peptide
WDGVGGAY

SEQ ID NO: 2646 - protein, 8 aa, synthetic construct
  REGION 1..8: note = Description of Artificial Sequence: Synthetic peptide
WNGVGGAY

SEQ ID NO: 2647 - protein, 8 aa, synthetic construct
  REGION 1..8: note = Description of Artificial Sequence: Synthetic peptide
WDGVGGAY

SEQ ID NO: 2648 - protein, 8 aa, synthetic construct
  REGION 1..8: note = Description of Artificial Sequence: Synthetic peptide
WDGVGGAY

SEQ ID NO: 2649 - protein, 6 aa, synthetic construct
  REGION 1..6: note = Description of Artificial Sequence: Synthetic peptide
RSWNNY

SEQ ID NO: 2650 - protein, 6 aa, synthetic construct
  REGION 1..6: note = Description of Artificial Sequence: Synthetic peptide
RSWNNY

SEQ ID NO: 2651 - protein, 6 aa, synthetic construct
  REGION 1..6: note = Description of Artificial Sequence: Synthetic peptide
RSWNNY

SEQ ID NO: 2652 - protein, 9 aa, synthetic construct
  REGION 1..9: note = Description of Artificial Sequence: Synthetic peptide
ESFGRIWYN

SEQ ID NO: 2653 - protein, 7 aa, synthetic construct
  REGION 1..7: note = Description of Artificial Sequence: Synthetic peptide
QHFGTDS

SEQ ID NO: 2654 - protein, 7 aa, synthetic construct
  REGION 1..7: note = Description of Artificial Sequence: Synthetic peptide
QQFGTDS

SEQ ID NO: 2655 - protein, 9 aa, synthetic construct
  REGION 1..9: note = Description of Artificial Sequence: Synthetic peptide
YGIQRAEGY

SEQ ID NO: 2656 - protein, 9 aa, synthetic construct
  REGION 1..9: note = Description of Artificial Sequence: Synthetic peptide
YRWVGRDTY

SEQ ID NO: 2657 - protein, 9 aa, synthetic construct
  REGION 1..9: note = Description of Artificial Sequence: Synthetic peptide
YRWVGRDTY

SEQ ID NO: 2658 - protein, 9 aa, synthetic construct
  REGION 1..9: note = Description of Artificial Sequence: Synthetic peptide
YRWVGRDTY

SEQ ID NO: 2659 - protein, 9 aa, synthetic construct
  REGION 1..9: note = Description of Artificial Sequence: Synthetic peptide
YRWEGRDTY

SEQ ID NO: 2660 - protein, 9 aa, synthetic construct
  REGION 1..9: note = Description of Artificial Sequence: Synthetic peptide
YRWEGRNTY

SEQ ID NO: 2661 - protein, 9 aa, synthetic construct
  REGION 1..9: note = Description of Artificial Sequence: Synthetic peptide
YRWVGRYTY

SEQ ID NO: 2662 - protein, 9 aa, synthetic construct
  REGION 1..9: note = Description of Artificial Sequence: Synthetic peptide
YRWVGRDTY

SEQ ID NO: 2663 - protein, 9 aa, synthetic construct
  REGION 1..9: note = Description of Artificial Sequence: Synthetic peptide
YRWVGRDTY

SEQ ID NO: 2664 - protein, 9 aa, synthetic construct
  REGION 1..9: note = Description of Artificial Sequence: Synthetic peptide
YRWVGRDTY

SEQ ID NO: 2665 - protein, 9 aa, synthetic construct
  REGION 1..9: note = Description of Artificial Sequence: Synthetic peptide
YRWVDRYTY

SEQ ID NO: 2666 - protein, 9 aa, synthetic construct
  REGION 1..9: note = Description of Artificial Sequence: Synthetic peptide
YRWIDRYTY

SEQ ID NO: 2667 - protein, 9 aa, synthetic construct
  REGION 1..9: note = Description of Artificial Sequence: Synthetic peptide
YRWVDRYTY

SEQ ID NO: 2668 - protein, 9 aa, synthetic construct
  REGION 1..9: note = Description of Artificial Sequence: Synthetic peptide
YRWVGRDTY

SEQ ID NO: 2669 - protein, 9 aa, synthetic construct
  REGION 1..9: note = Description of Artificial Sequence: Synthetic peptide
YRWTTRYTY

SEQ ID NO: 2670 - protein, 9 aa, synthetic construct
  REGION 1..9: note = Description of Artificial Sequence: Synthetic peptide
YRWVGGYTY

SEQ ID NO: 2671 - protein, 11 aa, synthetic construct
  REGION 1..11: note = Description of Artificial Sequence: Synthetic peptide
FRTVAASSMQY

SEQ ID NO: 2672 - protein, 11 aa, synthetic construct
  REGION 1..11: note = Description of Artificial Sequence: Synthetic peptide
FRTVSGSSMRY

SEQ ID NO: 2673 - protein, 10 aa, synthetic construct
  REGION 1..10: note = Description of Artificial Sequence: Synthetic peptide
NRGFAGAPSY

SEQ ID NO: 2674 - protein, 6 aa, synthetic construct
  REGION 1..6: note = Description of Artificial Sequence: Synthetic peptide
YFQSSY

SEQ ID NO: 2675 - protein, 6 aa, synthetic construct
  REGION 1..6: note = Description of Artificial Sequence: Synthetic peptide
YFQSSY

SEQ ID NO: 2676 - protein, 6 aa, synthetic construct
  REGION 1..6: note = Description of Artificial Sequence: Synthetic peptide
YFQSSY

SEQ ID NO: 2677 - protein, 11 aa, synthetic construct
  REGION 1..11: note = Description of Artificial Sequence: Synthetic peptide
HWTQGSVPKES

SEQ ID NO: 2678 - protein, 7 aa, synthetic construct
  REGION 1..7: note = Description of Artificial Sequence: Synthetic peptide
RSYSSDY

SEQ ID NO: 2679 - protein, 7 aa, synthetic construct
  REGION 1..7: note = Description of Artificial Sequence: Synthetic peptide
RYGDINY

SEQ ID NO: 2680 - protein, 7 aa, synthetic construct
  REGION 1..7: note = Description of Artificial Sequence: Synthetic peptide
RYGDINY

SEQ ID NO: 2681 - protein, 6 aa, synthetic construct
  REGION 1..6: note = Description of Artificial Sequence: Synthetic peptide
YDSRSY

SEQ ID NO: 2682 - protein, 7 aa, synthetic construct
  REGION 1..7: note = Description of Artificial Sequence: Synthetic peptide
YDNINAY

SEQ ID NO: 2683 - protein, 7 aa, synthetic construct
  REGION 1..7: note = Description of Artificial Sequence: Synthetic peptide
YDNINAY

SEQ ID NO: 2684 - protein, 7 aa, synthetic construct
  REGION 1..7: note = Description of Artificial Sequence: Synthetic peptide
YDNINAY

SEQ ID NO: 2685 - protein, 7 aa, synthetic construct
  REGION 1..7: note = Description of Artificial Sequence: Synthetic peptide
YDNINAY

SEQ ID NO: 2686 - protein, 7 aa, synthetic construct
  REGION 1..7: note = Description of Artificial Sequence: Synthetic peptide
WIAGKAY

SEQ ID NO: 2687 - protein, 7 aa, synthetic construct
  REGION 1..7: note = Description of Artificial Sequence: Synthetic peptide
RSQLGST

SEQ ID NO: 2688 - protein, 8 aa, synthetic construct
  REGION 1..8: note = Description of Artificial Sequence: Synthetic peptide
YYLDTYAY

SEQ ID NO: 2689 - protein, 7 aa, synthetic construct
  REGION 1..7: note = Description of Artificial Sequence: Synthetic peptide
RYFERTD

SEQ ID NO: 2690 - protein, 6 aa, synthetic construct
  REGION 1..6: note = Description of Artificial Sequence: Synthetic peptide
YFQSSY

SEQ ID NO: 2691 - protein, 9 aa, synthetic construct
  REGION 1..9: note = Description of Artificial Sequence: Synthetic peptide
YRWVGRDTY

SEQ ID NO: 2692 - protein, 7 aa, synthetic construct
  REGION 1..7: note = Description of Artificial Sequence: Synthetic peptide
WIAGKAY

SEQ ID NO: 2693 - protein, 8 aa, synthetic construct
  REGION 1..8: note = Description of Artificial Sequence: Synthetic peptide
WNGVGGAY

SEQ ID NO: 2694 - protein, 8 aa, synthetic construct
  REGION 1..8: note = Description of Artificial Sequence: Synthetic peptide
WDGVGGAY

SEQ ID NO: 2695 - protein, 7 aa, synthetic construct
  REGION 1..7: note = Description of Artificial Sequence: Synthetic peptide
RAFGRDY

SEQ ID NO: 2696 - protein, 11 aa, synthetic construct
  REGION 1..11: note = Description of Artificial Sequence: Synthetic peptide
FRTVAASSMQY

SEQ ID NO: 2697 - protein, 6 aa, synthetic construct
  REGION 1..6: note = Description of Artificial Sequence: Synthetic peptide
RSWNNY

SEQ ID NO: 2698 - protein, 6 aa, synthetic construct
  REGION 1..6: note = Description of Artificial Sequence: Synthetic peptide
YFQSSY

SEQ ID NO: 2699 - protein, 7 aa, synthetic construct
  REGION 1..7: note = Description of Artificial Sequence: Synthetic peptide
QHFGTDS

SEQ ID NO: 2700 - protein, 7 aa, synthetic construct
  REGION 1..7: note = Description of Artificial Sequence: Synthetic peptide
RSQLGST

SEQ ID NO: 2701 - protein, 7 aa, synthetic construct
  REGION 1..7: note = Description of Artificial Sequence: Synthetic peptide
YQGLYAY

SEQ ID NO: 2702 - protein, 7 aa, synthetic construct
  REGION 1..7: note = Description of Artificial Sequence: Synthetic peptide
YDNINAY

SEQ ID NO: 2703 - protein, 11 aa, synthetic construct
  REGION 1..11: note = Description of Artificial Sequence: Synthetic peptide
HWTQGSVPKES

SEQ ID NO: 2704 - protein, 11 aa, synthetic construct
  REGION 1..11: note = Description of Artificial Sequence: Synthetic peptide
FRTVSGSSMRY

SEQ ID NO: 2705 - protein, 7 aa, synthetic construct
  REGION 1..7: note = Description of Artificial Sequence: Synthetic peptide
RSYSSDY

SEQ ID NO: 2706 - protein, 6 aa, synthetic construct
  REGION 1..6: note = Description of Artificial Sequence: Synthetic peptide
RSWNNY

SEQ ID NO: 2707 - protein, 7 aa, synthetic construct
  REGION 1..7: note = Description of Artificial Sequence: Synthetic peptide
QQFGTDS

SEQ ID NO: 2708 - protein, 9 aa, synthetic construct
  REGION 1..9: note = Description of Artificial Sequence: Synthetic peptide
YGIQRAEGY

SEQ ID NO: 2709 - protein, 9 aa, synthetic construct
  REGION 1..9: note = Description of Artificial Sequence: Synthetic peptide
YRWVGRYTY

SEQ ID NO: 2710 - protein, 7 aa, synthetic construct
  REGION 1..7: note = Description of Artificial Sequence: Synthetic peptide
RYGDINY

SEQ ID NO: 2711 - protein, 9 aa, synthetic construct
  REGION 1..9: note = Description of Artificial Sequence: Synthetic peptide
YRWTTRYTY

SEQ ID NO: 2712 - protein, 8 aa, synthetic construct
  REGION 1..8: note = Description of Artificial Sequence: Synthetic peptide
YYLDTYAY

SEQ ID NO: 2713 - protein, 9 aa, synthetic construct
  REGION 1..9: note = Description of Artificial Sequence: Synthetic peptide
YRWEGRNTY

SEQ ID NO: 2714 - protein, 9 aa, synthetic construct
  REGION 1..9: note = Description of Artificial Sequence: Synthetic peptide
ESFGRIWYN

SEQ ID NO: 2715 - protein, 7 aa, synthetic construct
  REGION 1..7: note = Description of Artificial Sequence: Synthetic peptide
RYGDINY

SEQ ID NO: 2716 - protein, 7 aa, synthetic construct
  REGION 1..7: note = Description of Artificial Sequence: Synthetic peptide
RVFDHVY

SEQ ID NO: 2717 - protein, 6 aa, synthetic construct
  REGION 1..6: note = Description of Artificial Sequence: Synthetic peptide
YFQSSY

SEQ ID NO: 2718 - protein, 8 aa, synthetic construct
  REGION 1..8: note = Description of Artificial Sequence: Synthetic peptide
WDGVGGAY

SEQ ID NO: 2719 - protein, 9 aa, synthetic construct
  REGION 1..9: note = Description of Artificial Sequence: Synthetic peptide
YRWVGGYTY

SEQ ID NO: 2720 - protein, 6 aa, synthetic construct
  REGION 1..6: note = Description of Artificial Sequence: Synthetic peptide
YDSRSY

SEQ ID NO: 2721 - protein, 10 aa, synthetic construct
  REGION 1..10: note = Description of Artificial Sequence: Synthetic peptide
NRGFAGAPSY

SEQ ID NO: 2722 - protein, 7 aa, synthetic construct
  REGION 1..7: note = Description of Artificial Sequence: Synthetic peptide
RTMGRDY

SEQ ID NO: 2723 - protein, 11 aa, synthetic construct
  REGION 1..11: note = Description of Artificial Sequence: Synthetic peptide
FRHVSGSSMRY

SEQ ID NO: 2724 - protein, 11 aa, synthetic construct
  REGION 1..11: note = Description of Artificial Sequence: Synthetic peptide
FRTVSGSSSRY

SEQ ID NO: 2725 - protein, 11 aa, synthetic construct
  REGION 1..11: note = Description of Artificial Sequence: Synthetic peptide
FRTVSGSSMRY

SEQ ID NO: 2726 - protein, 11 aa, synthetic construct
  REGION 1..11: note = Description of Artificial Sequence: Synthetic peptide
FRTVRGSSMSY

SEQ ID NO: 2727 - protein, 11 aa, synthetic construct
  REGION 1..11: note = Description of Artificial Sequence: Synthetic peptide
FRTVSGSSKRY

SEQ ID NO: 2728 - protein, 11 aa, synthetic construct
  REGION 1..11: note = Description of Artificial Sequence: Synthetic peptide
FRMVSGSSMRY

SEQ ID NO: 2729 - protein, 11 aa, synthetic construct
  REGION 1..11: note = Description of Artificial Sequence: Synthetic peptide
FRTVQGSSMRY

SEQ ID NO: 2730 - protein, 11 aa, synthetic construct
  REGION 1..11: note = Description of Artificial Sequence: Synthetic peptide
FRTVYGSSMRY

SEQ ID NO: 2731 - protein, 11 aa, synthetic construct
  REGION 1..11: note = Description of Artificial Sequence: Synthetic peptide
FRTVSGSSYRY

SEQ ID NO: 2732 - protein, 11 aa, synthetic construct
  REGION 1..11: note = Description of Artificial Sequence: Synthetic peptide
FRTVLGSSMRY

SEQ ID NO: 2733 - protein, 11 aa, synthetic construct
  REGION 1..11: note = Description of Artificial Sequence: Synthetic peptide
FRRVSGSSMRY

SEQ ID NO: 2734 - protein, 11 aa, synthetic construct
  REGION 1..11: note = Description of Artificial Sequence: Synthetic peptide
FRTVSGSSMRY

SEQ ID NO: 2735 - protein, 11 aa, synthetic construct
  REGION 1..11: note = Description of Artificial Sequence: Synthetic peptide
FRTVSGSSARY

SEQ ID NO: 2736 - protein, 11 aa, synthetic construct
  REGION 1..11: note = Description of Artificial Sequence: Synthetic peptide
FRIVRGSSMRY

SEQ ID NO: 2737 - protein, 11 aa, synthetic construct
  REGION 1..11: note = Description of Artificial Sequence: Synthetic peptide
YRTVSGSSMRY

SEQ ID NO: 2738 - protein, 11 aa, synthetic construct
  REGION 1..11: note = Description of Artificial Sequence: Synthetic peptide
FRHVSGSSMRY

SEQ ID NO: 2739 - protein, 11 aa, synthetic construct
  REGION 1..11: note = Description of Artificial Sequence: Synthetic peptide
FRFVSGSSMRY

SEQ ID NO: 2740 - protein, 11 aa, synthetic construct
  REGION 1..11: note = Description of Artificial Sequence: Synthetic peptide
FRTVSGSSMRY

SEQ ID NO: 2741 - protein, 11 aa, synthetic construct
  REGION 1..11: note = Description of Artificial Sequence: Synthetic peptide
FRTKSGSSMRY

SEQ ID NO: 2742 - protein, 11 aa, synthetic construct
  REGION 1..11: note = Description of Artificial Sequence: Synthetic peptide
FRTVYGSSMRY

SEQ ID NO: 2743 - protein, 11 aa, synthetic construct
  REGION 1..11: note = Description of Artificial Sequence: Synthetic peptide
FRTVSGSSMGY

SEQ ID NO: 2744 - protein, 11 aa, synthetic construct
  REGION 1..11: note = Description of Artificial Sequence: Synthetic peptide
FRTVSGSSMRS

SEQ ID NO: 2745 - protein, 11 aa, synthetic construct
  REGION 1..11: note = Description of Artificial Sequence: Synthetic peptide
FRTVGGSSMRY

SEQ ID NO: 2746 - protein, 11 aa, synthetic construct
  REGION 1..11: note = Description of Artificial Sequence: Synthetic peptide
FRTVSGSSMRY

SEQ ID NO: 2747 - protein, 11 aa, synthetic construct
  REGION 1..11: note = Description of Artificial Sequence: Synthetic peptide
FRTVSGSHMRY

SEQ ID NO: 2748 - protein, 11 aa, synthetic construct
  REGION 1..11: note = Description of Artificial Sequence: Synthetic peptide
FRAVSGSSMRY

SEQ ID NO: 2749 - protein, 11 aa, synthetic construct
  REGION 1..11: note = Description of Artificial Sequence: Synthetic peptide
FRTVSGSSMRY

SEQ ID NO: 2750 - protein, 11 aa, synthetic construct
  REGION 1..11: note = Description of Artificial Sequence: Synthetic peptide
FRTVSGSPMRY

SEQ ID NO: 2751 - protein, 11 aa, synthetic construct
  REGION 1..11: note = Description of Artificial Sequence: Synthetic peptide
FRTVSGSSMSY

SEQ ID NO: 2752 - protein, 11 aa, synthetic construct
  REGION 1..11: note = Description of Artificial Sequence: Synthetic peptide
FRTVSGSSMRY

SEQ ID NO: 2753 - protein, 11 aa, synthetic construct
  REGION 1..11: note = Description of Artificial Sequence: Synthetic peptide
FRTVRGSSMRY

SEQ ID NO: 2754 - protein, 11 aa, synthetic construct
  REGION 1..11: note = Description of Artificial Sequence: Synthetic peptide
FRTVRGSSMRY

SEQ ID NO: 2755 - protein, 11 aa, synthetic construct
  REGION 1..11: note = Description of Artificial Sequence: Synthetic peptide
FRQVSGSSMRY

SEQ ID NO: 2756 - protein, 11 aa, synthetic construct
  REGION 1..11: note = Description of Artificial Sequence: Synthetic peptide
FRIVSGSSMGY

SEQ ID NO: 2757 - protein, 11 aa, synthetic construct
  REGION 1..11: note = Description of Artificial Sequence: Synthetic peptide
FRTVSGASMRY

SEQ ID NO: 2758 - protein, 11 aa, synthetic construct
  REGION 1..11: note = Description of Artificial Sequence: Synthetic peptide
FRTVHGSSMRY

SEQ ID NO: 2759 - protein, 11 aa, synthetic construct
  REGION 1..11: note = Description of Artificial Sequence: Synthetic peptide
FRMVSGSSMRY

SEQ ID NO: 2760 - protein, 11 aa, synthetic construct
  REGION 1..11: note = Description of Artificial Sequence: Synthetic peptide
FRTISGSSMRY

SEQ ID NO: 2761 - protein, 11 aa, synthetic construct
  REGION 1..11: note = Description of Artificial Sequence: Synthetic peptide
FRTRSGSSMRY

SEQ ID NO: 2762 - protein, 11 aa, synthetic construct
  REGION 1..11: note = Description of Artificial Sequence: Synthetic peptide
FRTVSGHSMRY

SEQ ID NO: 2763 - protein, 11 aa, synthetic construct
  REGION 1..11: note = Description of Artificial Sequence: Synthetic peptide
FRTVSGGSMRY

SEQ ID NO: 2764 - protein, 11 aa, synthetic construct
  REGION 1..11: note = Description of Artificial Sequence: Synthetic peptide
FRTKSGSSMRY

SEQ ID NO: 2765 - protein, 11 aa, synthetic construct
  REGION 1..11: note = Description of Artificial Sequence: Synthetic peptide
FRTASGTSMRY

SEQ ID NO: 2766 - protein, 11 aa, synthetic construct
  REGION 1..11: note = Description of Artificial Sequence: Synthetic peptide
FNTVSGSSMRY

SEQ ID NO: 2767 - protein, 11 aa, synthetic construct
  REGION 1..11: note = Description of Artificial Sequence: Synthetic peptide
FRTVRGSSQRY

SEQ ID NO: 2768 - protein, 11 aa, synthetic construct
  REGION 1..11: note = Description of Artificial Sequence: Synthetic peptide
FRTVLGSSMRY

SEQ ID NO: 2769 - protein, 11 aa, synthetic construct
  REGION 1..11: note = Description of Artificial Sequence: Synthetic peptide
FRTRSGSSMRY

SEQ ID NO: 2770 - protein, 11 aa, synthetic construct
  REGION 1..11: note = Description of Artificial Sequence: Synthetic peptide
FRTVSGLSMRY

SEQ ID NO: 2771 - protein, 11 aa, synthetic construct
  REGION 1..11: note = Description of Artificial Sequence: Synthetic peptide
FRTVRGSSQRY

SEQ ID NO: 2772 - protein, 11 aa, synthetic construct
  REGION 1..11: note = Description of Artificial Sequence: Synthetic peptide
FRTVSGSSMVY

SEQ ID NO: 2773 - protein, 11 aa, synthetic construct
  REGION 1..11: note = Description of Artificial Sequence: Synthetic peptide
FRTVSRSSMRY

SEQ ID NO: 2774 - protein, 11 aa, synthetic construct
  REGION 1..11: note = Description of Artificial Sequence: Synthetic peptide
FRTVSGSSMSY

SEQ ID NO: 2775 - protein, 11 aa, synthetic construct
  REGION 1..11: note = Description of Artificial Sequence: Synthetic peptide
FRTVSGSSARY

SEQ ID NO: 2776 - protein, 11 aa, synthetic construct
  REGION 1..11: note = Description of Artificial Sequence: Synthetic peptide
FHTVSGSSMRY

SEQ ID NO: 2777 - protein, 11 aa, synthetic construct
  REGION 1..11: note = Description of Artificial Sequence: Synthetic peptide
FRTVLGSSMRY

SEQ ID NO: 2778 - protein, 11 aa, synthetic construct
  REGION 1..11: note = Description of Artificial Sequence: Synthetic peptide
FRTVSGSSMRY

SEQ ID NO: 2779 - protein, 11 aa, synthetic construct
  REGION 1..11: note = Description of Artificial Sequence: Synthetic peptide
FRNVSGSSMRY

SEQ ID NO: 2780 - protein, 11 aa, synthetic construct
  REGION 1..11: note = Description of Artificial Sequence: Synthetic peptide
FRTVTGSSMRY

SEQ ID NO: 2781 - protein, 11 aa, synthetic construct
  REGION 1..11: note = Description of Artificial Sequence: Synthetic peptide
FRTVSGSSMRY

SEQ ID NO: 2782 - protein, 11 aa, synthetic construct
  REGION 1..11: note = Description of Artificial Sequence: Synthetic peptide
FRTVKGSSMRY

SEQ ID NO: 2783 - protein, 11 aa, synthetic construct
  REGION 1..11: note = Description of Artificial Sequence: Synthetic peptide
FRTNSGSSMRY

SEQ ID NO: 2784 - protein, 11 aa, synthetic construct
  REGION 1..11: note = Description of Artificial Sequence: Synthetic peptide
FRTVSGASMRY

SEQ ID NO: 2785 - protein, 11 aa, synthetic construct
  REGION 1..11: note = Description of Artificial Sequence: Synthetic peptide
FRTVNLSSMRY

SEQ ID NO: 2786 - protein, 11 aa, synthetic construct
  REGION 1..11: note = Description of Artificial Sequence: Synthetic peptide
FRTVTGSSMRY

SEQ ID NO: 2787 - protein, 11 aa, synthetic construct
  REGION 1..11: note = Description of Artificial Sequence: Synthetic peptide
FRKVSGSSARY

SEQ ID NO: 2788 - protein, 11 aa, synthetic construct
  REGION 1..11: note = Description of Artificial Sequence: Synthetic peptide
FRTYSGSSMRY

SEQ ID NO: 2789 - protein, 11 aa, synthetic construct
  REGION 1..11: note = Description of Artificial Sequence: Synthetic peptide
FRTVSKSSMRY

SEQ ID NO: 2790 - protein, 11 aa, synthetic construct
  REGION 1..11: note = Description of Artificial Sequence: Synthetic peptide
FKTVSGSSMRY

SEQ ID NO: 2791 - protein, 11 aa, synthetic construct
  REGION 1..11: note = Description of Artificial Sequence: Synthetic peptide
FRTRSGSSMRY

SEQ ID NO: 2792 - protein, 11 aa, synthetic construct
  REGION 1..11: note = Description of Artificial Sequence: Synthetic peptide
FRTSSGSSMRY

SEQ ID NO: 2793 - protein, 11 aa, synthetic construct
  REGION 1..11: note = Description of Artificial Sequence: Synthetic peptide
FRFLSGSSMRY

SEQ ID NO: 2794 - protein, 11 aa, synthetic construct
  REGION 1..11: note = Description of Artificial Sequence: Synthetic peptide
FRTVSGSSMRY

SEQ ID NO: 2795 - protein, 11 aa, synthetic construct
  REGION 1..11: note = Description of Artificial Sequence: Synthetic peptide
FRLVSGSSMRY

SEQ ID NO: 2796 - protein, 11 aa, synthetic construct
  REGION 1..11: note = Description of Artificial Sequence: Synthetic peptide
FRTVSGSSMRF

SEQ ID NO: 2797 - protein, 11 aa, synthetic construct
  REGION 1..11: note = Description of Artificial Sequence: Synthetic peptide
FRTQSGSSMRY

SEQ ID NO: 2798 - protein, 11 aa, synthetic construct
  REGION 1..11: note = Description of Artificial Sequence: Synthetic peptide
FRTVSGSSMPY

SEQ ID NO: 2799 - protein, 11 aa, synthetic construct
  REGION 1..11: note = Description of Artificial Sequence: Synthetic peptide
FRTLSGSSMRY

SEQ ID NO: 2800 - protein, 11 aa, synthetic construct
  REGION 1..11: note = Description of Artificial Sequence: Synthetic peptide
FRTVSGSAMRY

SEQ ID NO: 2801 - protein, 11 aa, synthetic construct
  REGION 1..11: note = Description of Artificial Sequence: Synthetic peptide
FRTTSGSSMRY

SEQ ID NO: 2802 - protein, 11 aa, synthetic construct
  REGION 1..11: note = Description of Artificial Sequence: Synthetic peptide
FRTVSGTSMRY

SEQ ID NO: 2803 - protein, 11 aa, synthetic construct
  REGION 1..11: note = Description of Artificial Sequence: Synthetic peptide
FRTRSGSSMRY

SEQ ID NO: 2804 - protein, 11 aa, synthetic construct
  REGION 1..11: note = Description of Artificial Sequence: Synthetic peptide
FRTSSGSSMRY

SEQ ID NO: 2805 - protein, 11 aa, synthetic construct
  REGION 1..11: note = Description of Artificial Sequence: Synthetic peptide
FRTVSGSSMSY

SEQ ID NO: 2806 - protein, 11 aa, synthetic construct
  REGION 1..11: note = Description of Artificial Sequence: Synthetic peptide
FRPVSGSSMRY

SEQ ID NO: 2807 - protein, 11 aa, synthetic construct
  REGION 1..11: note = Description of Artificial Sequence: Synthetic peptide
FRHVSGSSMRY

SEQ ID NO: 2808 - protein, 11 aa, synthetic construct
  REGION 1..11: note = Description of Artificial Sequence: Synthetic peptide
FRTKSGSSMRY

SEQ ID NO: 2809 - protein, 11 aa, synthetic construct
  REGION 1..11: note = Description of Artificial Sequence: Synthetic peptide
FTTVSGSSMRY

SEQ ID NO: 2810 - protein, 11 aa, synthetic construct
  REGION 1..11: note = Description of Artificial Sequence: Synthetic peptide
FHTVSGSSMRY

SEQ ID NO: 2811 - protein, 11 aa, synthetic construct
  REGION 1..11: note = Description of Artificial Sequence: Synthetic peptide
FRTVRGSSMRY

SEQ ID NO: 2812 - protein, 11 aa, synthetic construct
  REGION 1..11: note = Description of Artificial Sequence: Synthetic peptide
FRTVLGSSMRY

SEQ ID NO: 2813 - protein, 11 aa, synthetic construct
  REGION 1..11: note = Description of Artificial Sequence: Synthetic peptide
FRTVSGSSMRS

SEQ ID NO: 2814 - protein, 11 aa, synthetic construct
  REGION 1..11: note = Description of Artificial Sequence: Synthetic peptide
FRTVRGSSMRY

SEQ ID NO: 2815 - protein, 11 aa, synthetic construct
  REGION 1..11: note = Description of Artificial Sequence: Synthetic peptide
FRYVSGSSMRY

SEQ ID NO: 2816 - protein, 11 aa, synthetic construct
  REGION 1..11: note = Description of Artificial Sequence: Synthetic peptide
FRTVYGSSMRY

SEQ ID NO: 2817 - protein, 11 aa, synthetic construct
  REGION 1..11: note = Description of Artificial Sequence: Synthetic peptide
FRTVLGSSMRY

SEQ ID NO: 2818 - protein, 11 aa, synthetic construct
  REGION 1..11: note = Description of Artificial Sequence: Synthetic peptide
YRTVSGSSMRY

SEQ ID NO: 2819 - protein, 11 aa, synthetic construct
  REGION 1..11: note = Description of Artificial Sequence: Synthetic peptide
FRSVSGSSMRY

SEQ ID NO: 2820 - protein, 11 aa, synthetic construct
  REGION 1..11: note = Description of Artificial Sequence: Synthetic peptide
FRRVSGSSMRY

SEQ ID NO: 2821 - protein, 11 aa, synthetic construct
  REGION 1..11: note = Description of Artificial Sequence: Synthetic peptide
FRTVSGTSMRY

SEQ ID NO: 2822 - protein, 11 aa, synthetic construct
  REGION 1..11: note = Description of Artificial Sequence: Synthetic peptide
FRTVAGSSMRY

SEQ ID NO: 2823 - protein, 11 aa, synthetic construct
  REGION 1..11: note = Description of Artificial Sequence: Synthetic peptide
FRIVSGSSMRY

SEQ ID NO: 2824 - protein, 11 aa, synthetic construct
  REGION 1..11: note = Description of Artificial Sequence: Synthetic peptide
FRTVSGVSMRY

SEQ ID NO: 2825 - protein, 11 aa, synthetic construct
  REGION 1..11: note = Description of Artificial Sequence: Synthetic peptide
FRTVQGSSMRY

SEQ ID NO: 2826 - protein, 11 aa, synthetic construct
  REGION 1..11: note = Description of Artificial Sequence: Synthetic peptide
FRTASGSSMRY

SEQ ID NO: 2827 - protein, 11 aa, synthetic construct
  REGION 1..11: note = Description of Artificial Sequence: Synthetic peptide
FRTVSGSSSRY

SEQ ID NO: 2828 - protein, 11 aa, synthetic construct
  REGION 1..11: note = Description of Artificial Sequence: Synthetic peptide
FRTVQGSSMRY

SEQ ID NO: 2829 - protein, 11 aa, synthetic construct
  REGION 1..11: note = Description of Artificial Sequence: Synthetic peptide
FRTVRGSSMRY

SEQ ID NO: 2830 - protein, 11 aa, synthetic construct
  REGION 1..11: note = Description of Artificial Sequence: Synthetic peptide
FRTKSGSSMRY

SEQ ID NO: 2831 - protein, 11 aa, synthetic construct
  REGION 1..11: note = Description of Artificial Sequence: Synthetic peptide
FRTVWGSSMRY

SEQ ID NO: 2832 - protein, 11 aa, synthetic construct
  REGION 1..11: note = Description of Artificial Sequence: Synthetic peptide
FRTRSGSSMRY

SEQ ID NO: 2833 - protein, 11 aa, synthetic construct
  REGION 1..11: note = Description of Artificial Sequence: Synthetic peptide
FHTVCGTSMGY

SEQ ID NO: 2834 - protein, 11 aa, synthetic construct
  REGION 1..11: note = Description of Artificial Sequence: Synthetic peptide
FRTVSGSSQRY

SEQ ID NO: 2835 - protein, 11 aa, synthetic construct
  REGION 1..11: note = Description of Artificial Sequence: Synthetic peptide
FRTVSGSSMSY

SEQ ID NO: 2836 - protein, 11 aa, synthetic construct
  REGION 1..11: note = Description of Artificial Sequence: Synthetic peptide
FRTVRGSSMRY

SEQ ID NO: 2837 - protein, 11 aa, synthetic construct
  REGION 1..11: note = Description of Artificial Sequence: Synthetic peptide
FRTQSGSSMRY

SEQ ID NO: 2838 - protein, 11 aa, synthetic construct
  REGION 1..11: note = Description of Artificial Sequence: Synthetic peptide
FRTLSGSSMRY

SEQ ID NO: 2839 - protein, 11 aa, synthetic construct
  REGION 1..11: note = Description of Artificial Sequence: Synthetic peptide
FHTVSGSSMRY

SEQ ID NO: 2840 - protein, 11 aa, synthetic construct
  REGION 1..11: note = Description of Artificial Sequence: Synthetic peptide
FRRVSGSSMRY

SEQ ID NO: 2841 - protein, 11 aa, synthetic construct
  REGION 1..11: note = Description of Artificial Sequence: Synthetic peptide
FRLVSGSSMRY

SEQ ID NO: 2842 - protein, 11 aa, synthetic construct
  REGION 1..11: note = Description of Artificial Sequence: Synthetic peptide
FRTVSGSYMRY

SEQ ID NO: 2843 - protein, 11 aa, synthetic construct
  REGION 1..11: note = Description of Artificial Sequence: Synthetic peptide
FRTVGGSSMRY

SEQ ID NO: 2844 - protein, 11 aa, synthetic construct
  REGION 1..11: note = Description of Artificial Sequence: Synthetic peptide
FRTHSGSSMRY

SEQ ID NO: 2845 - protein, 11 aa, synthetic construct
  REGION 1..11: note = Description of Artificial Sequence: Synthetic peptide
FRTVSTSSMRY

SEQ ID NO: 2846 - protein, 11 aa, synthetic construct
  REGION 1..11: note = Description of Artificial Sequence: Synthetic peptide
FRTVLGTSMRY

SEQ ID NO: 2847 - protein, 11 aa, synthetic construct
  REGION 1..11: note = Description of Artificial Sequence: Synthetic peptide
FRTVSGSSMRY

SEQ ID NO: 2848 - protein, 11 aa, synthetic construct
  REGION 1..11: note = Description of Artificial Sequence: Synthetic peptide
FRTVSGSSMGY

SEQ ID NO: 2849 - protein, 11 aa, synthetic construct
  REGION 1..11: note = Description of Artificial Sequence: Synthetic peptide
FRTVSGSSMRA

SEQ ID NO: 2850 - protein, 11 aa, synthetic construct
  REGION 1..11: note = Description of Artificial Sequence: Synthetic peptide
FRILSGSSMRY

SEQ ID NO: 2851 - protein, 11 aa, synthetic construct
  REGION 1..11: note = Description of Artificial Sequence: Synthetic peptide
FRTVQGSSMRY

SEQ ID NO: 2852 - protein, 11 aa, synthetic construct
  REGION 1..11: note = Description of Artificial Sequence: Synthetic peptide
FRTVSGQSMGY

SEQ ID NO: 2853 - protein, 11 aa, synthetic construct
  REGION 1..11: note = Description of Artificial Sequence: Synthetic peptide
FRTVSGSSARY

SEQ ID NO: 2854 - protein, 11 aa, synthetic construct
  REGION 1..11: note = Description of Artificial Sequence: Synthetic peptide
FRYVSGSSMRY

SEQ ID NO: 2855 - protein, 11 aa, synthetic construct
  REGION 1..11: note = Description of Artificial Sequence: Synthetic peptide
FRTVSGSSMRY

SEQ ID NO: 2856 - protein, 11 aa, synthetic construct
  REGION 1..11: note = Description of Artificial Sequence: Synthetic peptide
FRRVSGSSMRY

SEQ ID NO: 2857 - protein, 11 aa, synthetic construct
  REGION 1..11: note = Description of Artificial Sequence: Synthetic peptide
FHTVSGSSMRY

SEQ ID NO: 2858 - protein, 11 aa, synthetic construct
  REGION 1..11: note = Description of Artificial Sequence: Synthetic peptide
FRQVSGSSMRY

SEQ ID NO: 2859 - protein, 11 aa, synthetic construct
  REGION 1..11: note = Description of Artificial Sequence: Synthetic peptide
FRTVSGSYMRY

SEQ ID NO: 2860 - protein, 11 aa, synthetic construct
  REGION 1..11: note = Description of Artificial Sequence: Synthetic peptide
FRTASGSSMRY

SEQ ID NO: 2861 - protein, 11 aa, synthetic construct
  REGION 1..11: note = Description of Artificial Sequence: Synthetic peptide
FRTVSGHSMRY

SEQ ID NO: 2862 - protein, 11 aa, synthetic construct
  REGION 1..11: note = Description of Artificial Sequence: Synthetic peptide
FRTVSGSSSRY

SEQ ID NO: 2863 - protein, 11 aa, synthetic construct
  REGION 1..11: note = Description of Artificial Sequence: Synthetic peptide
FRTVSGSSYSY

SEQ ID NO: 2864 - protein, 11 aa, synthetic construct
  REGION 1..11: note = Description of Artificial Sequence: Synthetic peptide
FRTVSGSSQSY

SEQ ID NO: 2865 - protein, 9 aa, synthetic construct
  REGION 1..9: note = Description of Artificial Sequence: Synthetic peptide
YRWTRRYTY

SEQ ID NO: 2866 - protein, 9 aa, synthetic construct
  REGION 1..9: note = Description of Artificial Sequence: Synthetic peptide
YRWRTRYTY

SEQ ID NO: 2867 - protein, 9 aa, synthetic construct
  REGION 1..9: note = Description of Artificial Sequence: Synthetic peptide
YRWTTRRTY

SEQ ID NO: 2868 - protein, 9 aa, synthetic construct
  REGION 1..9: note = Description of Artificial Sequence: Synthetic peptide
YRWTTRYIY

SEQ ID NO: 2869 - protein, 9 aa, synthetic construct
  REGION 1..9: note = Description of Artificial Sequence: Synthetic peptide
YRWRTRYTY

SEQ ID NO: 2870 - protein, 9 aa, synthetic construct
  REGION 1..9: note = Description of Artificial Sequence: Synthetic peptide
YRWTRRYTY

SEQ ID NO: 2871 - protein, 9 aa, synthetic construct
  REGION 1..9: note = Description of Artificial Sequence: Synthetic peptide
YRWRTRYTY

SEQ ID NO: 2872 - protein, 9 aa, synthetic construct
  REGION 1..9: note = Description of Artificial Sequence: Synthetic peptide
YRWTTRYIY

SEQ ID NO: 2873 - protein, 9 aa, synthetic construct
  REGION 1..9: note = Description of Artificial Sequence: Synthetic peptide
YRWTTRRTY

SEQ ID NO: 2874 - protein, 9 aa, synthetic construct
  REGION 1..9: note = Description of Artificial Sequence: Synthetic peptide
YRWRTRYTY

SEQ ID NO: 2875 - protein, 9 aa, synthetic construct
  REGION 1..9: note = Description of Artificial Sequence: Synthetic peptide
YRWTTRYTY

SEQ ID NO: 2876 - protein, 9 aa, synthetic construct
  REGION 1..9: note = Description of Artificial Sequence: Synthetic peptide
YRWRTRYTY

SEQ ID NO: 2877 - protein, 9 aa, synthetic construct
  REGION 1..9: note = Description of Artificial Sequence: Synthetic peptide
YHWTTRYTY

SEQ ID NO: 2878 - protein, 9 aa, synthetic construct
  REGION 1..9: note = Description of Artificial Sequence: Synthetic peptide
YRWTTRRTY

SEQ ID NO: 2879 - protein, 9 aa, synthetic construct
  REGION 1..9: note = Description of Artificial Sequence: Synthetic peptide
YRWTTRYTY

SEQ ID NO: 2880 - protein, 9 aa, synthetic construct
  REGION 1..9: note = Description of Artificial Sequence: Synthetic peptide
YRWTTRYTY

SEQ ID NO: 2881 - protein, 9 aa, synthetic construct
  REGION 1..9: note = Description of Artificial Sequence: Synthetic peptide
YRWTTRYAY

SEQ ID NO: 2882 - protein, 9 aa, synthetic construct
  REGION 1..9: note = Description of Artificial Sequence: Synthetic peptide
YRWVTRYTY

SEQ ID NO: 2883 - protein, 9 aa, synthetic construct
  REGION 1..9: note = Description of Artificial Sequence: Synthetic peptide
YRWVTRYTY

SEQ ID NO: 2884 - protein, 9 aa, synthetic construct
  REGION 1..9: note = Description of Artificial Sequence: Synthetic peptide
YRWSTRYTY

SEQ ID NO: 2885 - protein, 9 aa, synthetic construct
  REGION 1..9: note = Description of Artificial Sequence: Synthetic peptide
YRWRTRYTY

SEQ ID NO: 2886 - protein, 9 aa, synthetic construct
  REGION 1..9: note = Description of Artificial Sequence: Synthetic peptide
YRWTTRGTY

SEQ ID NO: 2887 - protein, 9 aa, synthetic construct
  REGION 1..9: note = Description of Artificial Sequence: Synthetic peptide
YRWDTRYTY

SEQ ID NO: 2888 - protein, 9 aa, synthetic construct
  REGION 1..9: note = Description of Artificial Sequence: Synthetic peptide
YRWTTRRTY

SEQ ID NO: 2889 - protein, 9 aa, synthetic construct
  REGION 1..9: note = Description of Artificial Sequence: Synthetic peptide
YRWRTRYTY

SEQ ID NO: 2890 - protein, 9 aa, synthetic construct
  REGION 1..9: note = Description of Artificial Sequence: Synthetic peptide
YRWTGRYTY

SEQ ID NO: 2891 - protein, 9 aa, synthetic construct
  REGION 1..9: note = Description of Artificial Sequence: Synthetic peptide
YRWRTRYTY

SEQ ID NO: 2892 - protein, 9 aa, synthetic construct
  REGION 1..9: note = Description of Artificial Sequence: Synthetic peptide
YRWRTRYTY

SEQ ID NO: 2893 - protein, 9 aa, synthetic construct
  REGION 1..9: note = Description of Artificial Sequence: Synthetic peptide
YRWITRYTY

SEQ ID NO: 2894 - protein, 9 aa, synthetic construct
  REGION 1..9: note = Description of Artificial Sequence: Synthetic peptide
YRWITRYTY

SEQ ID NO: 2895 - protein, 9 aa, synthetic construct
  REGION 1..9: note = Description of Artificial Sequence: Synthetic peptide
YRWRTRYTY

SEQ ID NO: 2896 - protein, 9 aa, synthetic construct
  REGION 1..9: note = Description of Artificial Sequence: Synthetic peptide
YRWTRRYTY

SEQ ID NO: 2897 - protein, 9 aa, synthetic construct
  REGION 1..9: note = Description of Artificial Sequence: Synthetic peptide
YSWTTRYTY

SEQ ID NO: 2898 - protein, 9 aa, synthetic construct
  REGION 1..9: note = Description of Artificial Sequence: Synthetic peptide
YRWTNRYTY

SEQ ID NO: 2899 - protein, 9 aa, synthetic construct
  REGION 1..9: note = Description of Artificial Sequence: Synthetic peptide
YRWTTRYRY

SEQ ID NO: 2900 - protein, 9 aa, synthetic construct
  REGION 1..9: note = Description of Artificial Sequence: Synthetic peptide
YRWTTRYTY

SEQ ID NO: 2901 - protein, 9 aa, synthetic construct
  REGION 1..9: note = Description of Artificial Sequence: Synthetic peptide
YRWTTRYKY

SEQ ID NO: 2902 - protein, 9 aa, synthetic construct
  REGION 1..9: note = Description of Artificial Sequence: Synthetic peptide
YRWHTRYTY

SEQ ID NO: 2903 - protein, 9 aa, synthetic construct
  REGION 1..9: note = Description of Artificial Sequence: Synthetic peptide
YRWTRRYTY

SEQ ID NO: 2904 - protein, 9 aa, synthetic construct
  REGION 1..9: note = Description of Artificial Sequence: Synthetic peptide
YRWMTRYTY

SEQ ID NO: 2905 - protein, 9 aa, synthetic construct
  REGION 1..9: note = Description of Artificial Sequence: Synthetic peptide
YRWTTRYRY

SEQ ID NO: 2906 - protein, 9 aa, synthetic construct
  REGION 1..9: note = Description of Artificial Sequence: Synthetic peptide
YRWSTRYTY

SEQ ID NO: 2907 - protein, 9 aa, synthetic construct
  REGION 1..9: note = Description of Artificial Sequence: Synthetic peptide
YRWTTRYTF

SEQ ID NO: 2908 - protein, 9 aa, synthetic construct
  REGION 1..9: note = Description of Artificial Sequence: Synthetic peptide
YRWRTRYTY

SEQ ID NO: 2909 - protein, 9 aa, synthetic construct
  REGION 1..9: note = Description of Artificial Sequence: Synthetic peptide
YRWTTRRTY

SEQ ID NO: 2910 - protein, 9 aa, synthetic construct
  REGION 1..9: note = Description of Artificial Sequence: Synthetic peptide
YRWATRYTY

SEQ ID NO: 2911 - protein, 9 aa, synthetic construct
  REGION 1..9: note = Description of Artificial Sequence: Synthetic peptide
YRWHTRYTY

SEQ ID NO: 2912 - protein, 9 aa, synthetic construct
  REGION 1..9: note = Description of Artificial Sequence: Synthetic peptide
YRWGTRYTY

SEQ ID NO: 2913 - protein, 9 aa, synthetic construct
  REGION 1..9: note = Description of Artificial Sequence: Synthetic peptide
YRWTTRNTY

SEQ ID NO: 2914 - protein, 9 aa, synthetic construct
  REGION 1..9: note = Description of Artificial Sequence: Synthetic peptide
YRWRTRYTY

SEQ ID NO: 2915 - protein, 9 aa, synthetic construct
  REGION 1..9: note = Description of Artificial Sequence: Synthetic peptide
YRWTTRYAY

SEQ ID NO: 2916 - protein, 9 aa, synthetic construct
  REGION 1..9: note = Description of Artificial Sequence: Synthetic peptide
YRWRTRYTY

SEQ ID NO: 2917 - protein, 9 aa, synthetic construct
  REGION 1..9: note = Description of Artificial Sequence: Synthetic peptide
YRWTTRRTY

SEQ ID NO: 2918 - protein, 9 aa, synthetic construct
  REGION 1..9: note = Description of Artificial Sequence: Synthetic peptide
YRWTTRRTY

SEQ ID NO: 2919 - protein, 9 aa, synthetic construct
  REGION 1..9: note = Description of Artificial Sequence: Synthetic peptide
YRWTSRYTY

SEQ ID NO: 2920 - protein, 9 aa, synthetic construct
  REGION 1..9: note = Description of Artificial Sequence: Synthetic peptide
YRWTTRVTY

SEQ ID NO: 2921 - protein, 9 aa, synthetic construct
  REGION 1..9: note = Description of Artificial Sequence: Synthetic peptide
YRWTTRTTY

SEQ ID NO: 2922 - protein, 9 aa, synthetic construct
  REGION 1..9: note = Description of Artificial Sequence: Synthetic peptide
YRWRTRYTY

SEQ ID NO: 2923 - protein, 9 aa, synthetic construct
  REGION 1..9: note = Description of Artificial Sequence: Synthetic peptide
YRWATRYTY

SEQ ID NO: 2924 - protein, 9 aa, synthetic construct
  REGION 1..9: note = Description of Artificial Sequence: Synthetic peptide
YRWTTRRTY

SEQ ID NO: 2925 - protein, 9 aa, synthetic construct
  REGION 1..9: note = Description of Artificial Sequence: Synthetic peptide
LRWTTRYTY

SEQ ID NO: 2926 - protein, 9 aa, synthetic construct
  REGION 1..9: note = Description of Artificial Sequence: Synthetic peptide
YRWTTRGTY

SEQ ID NO: 2927 - protein, 9 aa, synthetic construct
  REGION 1..9: note = Description of Artificial Sequence: Synthetic peptide
YRWRTRYTY

SEQ ID NO: 2928 - protein, 9 aa, synthetic construct
  REGION 1..9: note = Description of Artificial Sequence: Synthetic peptide
YRWTTRATY

SEQ ID NO: 2929 - protein, 9 aa, synthetic construct
  REGION 1..9: note = Description of Artificial Sequence: Synthetic peptide
YRWTTRRTY

SEQ ID NO: 2930 - protein, 9 aa, synthetic construct
  REGION 1..9: note = Description of Artificial Sequence: Synthetic peptide
YRWPTRYTY

SEQ ID NO: 2931 - protein, 9 aa, synthetic construct
  REGION 1..9: note = Description of Artificial Sequence: Synthetic peptide
YRWRTRYTY

SEQ ID NO: 2932 - protein, 9 aa, synthetic construct
  REGION 1..9: note = Description of Artificial Sequence: Synthetic peptide
YRWKTRYTY

SEQ ID NO: 2933 - protein, 9 aa, synthetic construct
  REGION 1..9: note = Description of Artificial Sequence: Synthetic peptide
YRWSTRYTY

SEQ ID NO: 2934 - protein, 9 aa, synthetic construct
  REGION 1..9: note = Description of Artificial Sequence: Synthetic peptide
YRWKTRRTY

SEQ ID NO: 2935 - protein, 9 aa, synthetic construct
  REGION 1..9: note = Description of Artificial Sequence: Synthetic peptide
YRWTTRRTY

SEQ ID NO: 2936 - protein, 9 aa, synthetic construct
  REGION 1..9: note = Description of Artificial Sequence: Synthetic peptide
YRWTTRYRY

SEQ ID NO: 2937 - protein, 9 aa, synthetic construct
  REGION 1..9: note = Description of Artificial Sequence: Synthetic peptide
YRWRTRYTY

SEQ ID NO: 2938 - protein, 9 aa, synthetic construct
  REGION 1..9: note = Description of Artificial Sequence: Synthetic peptide
YRWTTRYKY

SEQ ID NO: 2939 - protein, 9 aa, synthetic construct
  REGION 1..9: note = Description of Artificial Sequence: Synthetic peptide
YRWKTRYTY

SEQ ID NO: 2940 - protein, 9 aa, synthetic construct
  REGION 1..9: note = Description of Artificial Sequence: Synthetic peptide
YRWTTRVTY

SEQ ID NO: 2941 - protein, 9 aa, synthetic construct
  REGION 1..9: note = Description of Artificial Sequence: Synthetic peptide
YRWTTRFTY

SEQ ID NO: 2942 - protein, 9 aa, synthetic construct
  REGION 1..9: note = Description of Artificial Sequence: Synthetic peptide
YRWTTRFTY

SEQ ID NO: 2943 - protein, 9 aa, synthetic construct
  REGION 1..9: note = Description of Artificial Sequence: Synthetic peptide
YRWRTRYTY

SEQ ID NO: 2944 - protein, 9 aa, synthetic construct
  REGION 1..9: note = Description of Artificial Sequence: Synthetic peptide
YRWTTRYTH

SEQ ID NO: 2945 - protein, 9 aa, synthetic construct
  REGION 1..9: note = Description of Artificial Sequence: Synthetic peptide
YRWTRRYTY

SEQ ID NO: 2946 - protein, 9 aa, synthetic construct
  REGION 1..9: note = Description of Artificial Sequence: Synthetic peptide
YRWTTRYTY

SEQ ID NO: 2947 - protein, 9 aa, synthetic construct
  REGION 1..9: note = Description of Artificial Sequence: Synthetic peptide
YRWTTRSTY

SEQ ID NO: 2948 - protein, 9 aa, synthetic construct
  REGION 1..9: note = Description of Artificial Sequence: Synthetic peptide
YSWTTRYTY

SEQ ID NO: 2949 - protein, 9 aa, synthetic construct
  REGION 1..9: note = Description of Artificial Sequence: Synthetic peptide
YRWTTRGTY

SEQ ID NO: 2950 - protein, 9 aa, synthetic construct
  REGION 1..9: note = Description of Artificial Sequence: Synthetic peptide
YRWKTRYTY

SEQ ID NO: 2951 - protein, 9 aa, synthetic construct
  REGION 1..9: note = Description of Artificial Sequence: Synthetic peptide
YRWTTRFTY

SEQ ID NO: 2952 - protein, 9 aa, synthetic construct
  REGION 1..9: note = Description of Artificial Sequence: Synthetic peptide
YRWRTRYTY

SEQ ID NO: 2953 - protein, 9 aa, synthetic construct
  REGION 1..9: note = Description of Artificial Sequence: Synthetic peptide
YRWTTRRTY

SEQ ID NO: 2954 - protein, 9 aa, synthetic construct
  REGION 1..9: note = Description of Artificial Sequence: Synthetic peptide
YRWSTRYTY

SEQ ID NO: 2955 - protein, 9 aa, synthetic construct
  REGION 1..9: note = Description of Artificial Sequence: Synthetic peptide
YRWTTRLTY

SEQ ID NO: 2956 - protein, 9 aa, synthetic construct
  REGION 1..9: note = Description of Artificial Sequence: Synthetic peptide
YRWTRRYTY

SEQ ID NO: 2957 - protein, 9 aa, synthetic construct
  REGION 1..9: note = Description of Artificial Sequence: Synthetic peptide
YRWTTRLTY

SEQ ID NO: 2958 - protein, 9 aa, synthetic construct
  REGION 1..9: note = Description of Artificial Sequence: Synthetic peptide
YRWTRRYTY

SEQ ID NO: 2959 - protein, 9 aa, synthetic construct
  REGION 1..9: note = Description of Artificial Sequence: Synthetic peptide
YRWTTRRTY

SEQ ID NO: 2960 - protein, 9 aa, synthetic construct
  REGION 1..9: note = Description of Artificial Sequence: Synthetic peptide
YQWTTRYTY

SEQ ID NO: 2961 - protein, 9 aa, synthetic construct
  REGION 1..9: note = Description of Artificial Sequence: Synthetic peptide
YRWTRRYTY

SEQ ID NO: 2962 - protein, 9 aa, synthetic construct
  REGION 1..9: note = Description of Artificial Sequence: Synthetic peptide
YRWTTRMTY

SEQ ID NO: 2963 - protein, 9 aa, synthetic construct
  REGION 1..9: note = Description of Artificial Sequence: Synthetic peptide
YRWTTRRTY

SEQ ID NO: 2964 - protein, 9 aa, synthetic construct
  REGION 1..9: note = Description of Artificial Sequence: Synthetic peptide
YRWTTRYRY

SEQ ID NO: 2965 - protein, 9 aa, synthetic construct
  REGION 1..9: note = Description of Artificial Sequence: Synthetic peptide
YRWLTRYTY

SEQ ID NO: 2966 - protein, 9 aa, synthetic construct
  REGION 1..9: note = Description of Artificial Sequence: Synthetic peptide
YEWTTRYTY

SEQ ID NO: 2967 - protein, 9 aa, synthetic construct
  REGION 1..9: note = Description of Artificial Sequence: Synthetic peptide
YRWRTRYTY

SEQ ID NO: 2968 - protein, 9 aa, synthetic construct
  REGION 1..9: note = Description of Artificial Sequence: Synthetic peptide
YRWRTRYTY

SEQ ID NO: 2969 - protein, 9 aa, synthetic construct
  REGION 1..9: note = Description of Artificial Sequence: Synthetic peptide
YRWRTRYTY

SEQ ID NO: 2970 - protein, 9 aa, synthetic construct
  REGION 1..9: note = Description of Artificial Sequence: Synthetic peptide
YRWSTRYTY

SEQ ID NO: 2971 - protein, 9 aa, synthetic construct
  REGION 1..9: note = Description of Artificial Sequence: Synthetic peptide
YRWTTRLTY

SEQ ID NO: 2972 - protein, 9 aa, synthetic construct
  REGION 1..9: note = Description of Artificial Sequence: Synthetic peptide
YRWTTRLTY

SEQ ID NO: 2973 - protein, 9 aa, synthetic construct
  REGION 1..9: note = Description of Artificial Sequence: Synthetic peptide
YKWTTRYTY

SEQ ID NO: 2974 - protein, 9 aa, synthetic construct
  REGION 1..9: note = Description of Artificial Sequence: Synthetic peptide
YRWTTRSTY

SEQ ID NO: 2975 - protein, 9 aa, synthetic construct
  REGION 1..9: note = Description of Artificial Sequence: Synthetic peptide
YRWRTRYTY

SEQ ID NO: 2976 - protein, 9 aa, synthetic construct
  REGION 1..9: note = Description of Artificial Sequence: Synthetic peptide
YRWSTRYTY

SEQ ID NO: 2977 - protein, 9 aa, synthetic construct
  REGION 1..9: note = Description of Artificial Sequence: Synthetic peptide
YRWTTRYTY

SEQ ID NO: 2978 - protein, 9 aa, synthetic construct
  REGION 1..9: note = Description of Artificial Sequence: Synthetic peptide
YRWRTRYTY

SEQ ID NO: 2979 - protein, 9 aa, synthetic construct
  REGION 1..9: note = Description of Artificial Sequence: Synthetic peptide
YRWLTRYTY

SEQ ID NO: 2980 - protein, 9 aa, synthetic construct
  REGION 1..9: note = Description of Artificial Sequence: Synthetic peptide
YRWRTRYTY

SEQ ID NO: 2981 - protein, 9 aa, synthetic construct
  REGION 1..9: note = Description of Artificial Sequence: Synthetic peptide
YRWTTRYTY

SEQ ID NO: 2982 - protein, 9 aa, synthetic construct
  REGION 1..9: note = Description of Artificial Sequence: Synthetic peptide
YRWTTRYRY

SEQ ID NO: 2983 - protein, 9 aa, synthetic construct
  REGION 1..9: note = Description of Artificial Sequence: Synthetic peptide
YRWTTRYTY

SEQ ID NO: 2984 - protein, 9 aa, synthetic construct
  REGION 1..9: note = Description of Artificial Sequence: Synthetic peptide
YRWPTRYTY

SEQ ID NO: 2985 - protein, 9 aa, synthetic construct
  REGION 1..9: note = Description of Artificial Sequence: Synthetic peptide
YRWTTRHTY

SEQ ID NO: 2986 - protein, 9 aa, synthetic construct
  REGION 1..9: note = Description of Artificial Sequence: Synthetic peptide
YRWTRRYTY

SEQ ID NO: 2987 - protein, 9 aa, synthetic construct
  REGION 1..9: note = Description of Artificial Sequence: Synthetic peptide
YRWHTRYTY

SEQ ID NO: 2988 - protein, 9 aa, synthetic construct
  REGION 1..9: note = Description of Artificial Sequence: Synthetic peptide
YRWTNRYTY

SEQ ID NO: 2989 - protein, 9 aa, synthetic construct
  REGION 1..9: note = Description of Artificial Sequence: Synthetic peptide
YRWTTRYRY

SEQ ID NO: 2990 - protein, 9 aa, synthetic construct
  REGION 1..9: note = Description of Artificial Sequence: Synthetic peptide
YRWTTRRTY

SEQ ID NO: 2991 - protein, 9 aa, synthetic construct
  REGION 1..9: note = Description of Artificial Sequence: Synthetic peptide
YRWSTRYTY

SEQ ID NO: 2992 - protein, 9 aa, synthetic construct
  REGION 1..9: note = Description of Artificial Sequence: Synthetic peptide
YRWSTRYTY

SEQ ID NO: 2993 - protein, 9 aa, synthetic construct
  REGION 1..9: note = Description of Artificial Sequence: Synthetic peptide
YRWRTRYTY

SEQ ID NO: 2994 - protein, 9 aa, synthetic construct
  REGION 1..9: note = Description of Artificial Sequence: Synthetic peptide
YRWTTRYTY

SEQ ID NO: 2995 - protein, 9 aa, synthetic construct
  REGION 1..9: note = Description of Artificial Sequence: Synthetic peptide
YEWTTRYTY

SEQ ID NO: 2996 - protein, 9 aa, synthetic construct
  REGION 1..9: note = Description of Artificial Sequence: Synthetic peptide
YRWTTRSTY

SEQ ID NO: 2997 - protein, 9 aa, synthetic construct
  REGION 1..9: note = Description of Artificial Sequence: Synthetic peptide
YRWTTRYTY

SEQ ID NO: 2998 - protein, 9 aa, synthetic construct
  REGION 1..9: note = Description of Artificial Sequence: Synthetic peptide
YRWSTRYTY

SEQ ID NO: 2999 - protein, 9 aa, synthetic construct
  REGION 1..9: note = Description of Artificial Sequence: Synthetic peptide
YRWSTRYTY

SEQ ID NO: 3000 - protein, 9 aa, synthetic construct
  REGION 1..9: note = Description of Artificial Sequence: Synthetic peptide
YRWTYRYTY

SEQ ID NO: 3001 - protein, 9 aa, synthetic construct
  REGION 1..9: note = Description of Artificial Sequence: Synthetic peptide
YRWTTRLTY

SEQ ID NO: 3002 - protein, 9 aa, synthetic construct
  REGION 1..9: note = Description of Artificial Sequence: Synthetic peptide
YEWTTRYTY

SEQ ID NO: 3003 - protein, 9 aa, synthetic construct
  REGION 1..9: note = Description of Artificial Sequence: Synthetic peptide
YRWTTRLTY

SEQ ID NO: 3004 - protein, 11 aa, synthetic construct
  REGION 1..11: note = Description of Artificial Sequence: Synthetic peptide
FRPAAGSPMRY

SEQ ID NO: 3005 - protein, 11 aa, synthetic construct
  REGION 1..11: note = Description of Artificial Sequence: Synthetic peptide
FRTVDGSPLRY

SEQ ID NO: 3006 - protein, 11 aa, synthetic construct
  REGION 1..11: note = Description of Artificial Sequence: Synthetic peptide
FRTVSGSSKRY

SEQ ID NO: 3007 - protein, 11 aa, synthetic construct
  REGION 1..11: note = Description of Artificial Sequence: Synthetic peptide
FSAGSGTEMSY

SEQ ID NO: 3008 - protein, 11 aa, synthetic construct
  REGION 1..11: note = Description of Artificial Sequence: Synthetic peptide
FGSLSGSSTTY

SEQ ID NO: 3009 - protein, 11 aa, synthetic construct
  REGION 1..11: note = Description of Artificial Sequence: Synthetic peptide
FGSVSGSWTRY

SEQ ID NO: 3010 - protein, 11 aa, synthetic construct
  REGION 1..11: note = Description of Artificial Sequence: Synthetic peptide
FRLVSGSSMSY

SEQ ID NO: 3011 - protein, 11 aa, synthetic construct
  REGION 1..11: note = Description of Artificial Sequence: Synthetic peptide
FRTGSGTSKSY

SEQ ID NO: 3012 - protein, 11 aa, synthetic construct
  REGION 1..11: note = Description of Artificial Sequence: Synthetic peptide
FSNMSGTTRRY

SEQ ID NO: 3013 - protein, 11 aa, synthetic construct
  REGION 1..11: note = Description of Artificial Sequence: Synthetic peptide
FRTVPGSAMGY

SEQ ID NO: 3014 - protein, 11 aa, synthetic construct
  REGION 1..11: note = Description of Artificial Sequence: Synthetic peptide
FRAESGSSMGY

SEQ ID NO: 3015 - protein, 11 aa, synthetic construct
  REGION 1..11: note = Description of Artificial Sequence: Synthetic peptide
FRTLYGSSRSY

SEQ ID NO: 3016 - protein, 11 aa, synthetic construct
  REGION 1..11: note = Description of Artificial Sequence: Synthetic peptide
FSPFSGSDTGY

SEQ ID NO: 3017 - protein, 11 aa, synthetic construct
  REGION 1..11: note = Description of Artificial Sequence: Synthetic peptide
FSTFSGSSISY

SEQ ID NO: 3018 - protein, 11 aa, synthetic construct
  REGION 1..11: note = Description of Artificial Sequence: Synthetic peptide
FRTLAGSEMRY

SEQ ID NO: 3019 - protein, 11 aa, synthetic construct
  REGION 1..11: note = Description of Artificial Sequence: Synthetic peptide
FRTVSGSGVRY

SEQ ID NO: 3020 - protein, 11 aa, synthetic construct
  REGION 1..11: note = Description of Artificial Sequence: Synthetic peptide
FRPGAGHSNSY

SEQ ID NO: 3021 - protein, 11 aa, synthetic construct
  REGION 1..11: note = Description of Artificial Sequence: Synthetic peptide
FRRASGTAMSY

SEQ ID NO: 3022 - protein, 11 aa, synthetic construct
  REGION 1..11: note = Description of Artificial Sequence: Synthetic peptide
FTSASGTDLSY

SEQ ID NO: 3023 - protein, 11 aa, synthetic construct
  REGION 1..11: note = Description of Artificial Sequence: Synthetic peptide
FRSANGSSKRY

SEQ ID NO: 3024 - protein, 11 aa, synthetic construct
  REGION 1..11: note = Description of Artificial Sequence: Synthetic peptide
FKTIAGAGMRY

SEQ ID NO: 3025 - protein, 11 aa, synthetic construct
  REGION 1..11: note = Description of Artificial Sequence: Synthetic peptide
FRYGSGSSLSY

SEQ ID NO: 3026 - protein, 11 aa, synthetic construct
  REGION 1..11: note = Description of Artificial Sequence: Synthetic peptide
FRTVPGASMKY

SEQ ID NO: 3027 - protein, 11 aa, synthetic construct
  REGION 1..11: note = Description of Artificial Sequence: Synthetic peptide
FRTVDGSAISY

SEQ ID NO: 3028 - protein, 11 aa, synthetic construct
  REGION 1..11: note = Description of Artificial Sequence: Synthetic peptide
FRTVKGSGGSY

SEQ ID NO: 3029 - protein, 11 aa, synthetic construct
  REGION 1..11: note = Description of Artificial Sequence: Synthetic peptide
FRTVSGSSRGY

SEQ ID NO: 3030 - protein, 11 aa, synthetic construct
  REGION 1..11: note = Description of Artificial Sequence: Synthetic peptide
FRPGPGSQMAY

SEQ ID NO: 3031 - protein, 11 aa, synthetic construct
  REGION 1..11: note = Description of Artificial Sequence: Synthetic peptide
FRTVAGSASGY

SEQ ID NO: 3032 - protein, 11 aa, synthetic construct
  REGION 1..11: note = Description of Artificial Sequence: Synthetic peptide
FRTVSGSSYSY

SEQ ID NO: 3033 - protein, 11 aa, synthetic construct
  REGION 1..11: note = Description of Artificial Sequence: Synthetic peptide
FINLKGSSMAY

SEQ ID NO: 3034 - protein, 11 aa, synthetic construct
  REGION 1..11: note = Description of Artificial Sequence: Synthetic peptide
FRMVTGSYGGY

SEQ ID NO: 3035 - protein, 11 aa, synthetic construct
  REGION 1..11: note = Description of Artificial Sequence: Synthetic peptide
FKSSYGLPMRY

SEQ ID NO: 3036 - protein, 11 aa, synthetic construct
  REGION 1..11: note = Description of Artificial Sequence: Synthetic peptide
FKTVSGQSLRY

SEQ ID NO: 3037 - protein, 11 aa, synthetic construct
  REGION 1..11: note = Description of Artificial Sequence: Synthetic peptide
FRTVTGRAARY

SEQ ID NO: 3038 - protein, 11 aa, synthetic construct
  REGION 1..11: note = Description of Artificial Sequence: Synthetic peptide
FGPAIGASRTY

SEQ ID NO: 3039 - protein, 11 aa, synthetic construct
  REGION 1..11: note = Description of Artificial Sequence: Synthetic peptide
FRTVSGAPKSY

SEQ ID NO: 3040 - protein, 11 aa, synthetic construct
  REGION 1..11: note = Description of Artificial Sequence: Synthetic peptide
FHTVSGSSMSY

SEQ ID NO: 3041 - protein, 11 aa, synthetic construct
  REGION 1..11: note = Description of Artificial Sequence: Synthetic peptide
FRRLEGYSNRY

SEQ ID NO: 3042 - protein, 11 aa, synthetic construct
  REGION 1..11: note = Description of Artificial Sequence: Synthetic peptide
FRTGSGSSMGY

SEQ ID NO: 3043 - protein, 11 aa, synthetic construct
  REGION 1..11: note = Description of Artificial Sequence: Synthetic peptide
FTTVTGSSMSY

SEQ ID NO: 3044 - protein, 9 aa, synthetic construct
  REGION 1..9: note = Description of Artificial Sequence: Synthetic peptide
YYWTERRPY

SEQ ID NO: 3045 - protein, 9 aa, synthetic construct
  REGION 1..9: note = Description of Artificial Sequence: Synthetic peptide
YSWDDAHPY

SEQ ID NO: 3046 - protein, 9 aa, synthetic construct
  REGION 1..9: note = Description of Artificial Sequence: Synthetic peptide
YRWMTRLTY

SEQ ID NO: 3047 - protein, 9 aa, synthetic construct
  REGION 1..9: note = Description of Artificial Sequence: Synthetic peptide
YDWADAQPY

SEQ ID NO: 3048 - protein, 9 aa, synthetic construct
  REGION 1..9: note = Description of Artificial Sequence: Synthetic peptide
YSWTDRLPY

SEQ ID NO: 3049 - protein, 9 aa, synthetic construct
  REGION 1..9: note = Description of Artificial Sequence: Synthetic peptide
YRWATRLPY

SEQ ID NO: 3050 - protein, 9 aa, synthetic construct
  REGION 1..9: note = Description of Artificial Sequence: Synthetic peptide
YKWSNRLPY

SEQ ID NO: 3051 - protein, 9 aa, synthetic construct
  REGION 1..9: note = Description of Artificial Sequence: Synthetic peptide
YGWKTRQPY

SEQ ID NO: 3052 - protein, 9 aa, synthetic construct
  REGION 1..9: note = Description of Artificial Sequence: Synthetic peptide
YRWPNRRGY

SEQ ID NO: 3053 - protein, 9 aa, synthetic construct
  REGION 1..9: note = Description of Artificial Sequence: Synthetic peptide
YDWTTRQRY

SEQ ID NO: 3054 - protein, 9 aa, synthetic construct
  REGION 1..9: note = Description of Artificial Sequence: Synthetic peptide
YNWSYAQPY

SEQ ID NO: 3055 - protein, 9 aa, synthetic construct
  REGION 1..9: note = Description of Artificial Sequence: Synthetic peptide
YNWTDSLQY

SEQ ID NO: 3056 - protein, 9 aa, synthetic construct
  REGION 1..9: note = Description of Artificial Sequence: Synthetic peptide
YSWTTSLPY

SEQ ID NO: 3057 - protein, 9 aa, synthetic construct
  REGION 1..9: note = Description of Artificial Sequence: Synthetic peptide
YKWRSRSTY

SEQ ID NO: 3058 - protein, 9 aa, synthetic construct
  REGION 1..9: note = Description of Artificial Sequence: Synthetic peptide
YSQTTRDPY

SEQ ID NO: 3059 - protein, 9 aa, synthetic construct
  REGION 1..9: note = Description of Artificial Sequence: Synthetic peptide
YRWTARDTY

SEQ ID NO: 3060 - protein, 9 aa, synthetic construct
  REGION 1..9: note = Description of Artificial Sequence: Synthetic peptide
YRWTSRLSY

SEQ ID NO: 3061 - protein, 9 aa, synthetic construct
  REGION 1..9: note = Description of Artificial Sequence: Synthetic peptide
YSWTTRSRY

SEQ ID NO: 3062 - protein, 9 aa, synthetic construct
  REGION 1..9: note = Description of Artificial Sequence: Synthetic peptide
YNWTSRYRY

SEQ ID NO: 3063 - protein, 9 aa, synthetic construct
  REGION 1..9: note = Description of Artificial Sequence: Synthetic peptide
YSWKTRFPY

SEQ ID NO: 3064 - protein, 9 aa, synthetic construct
  REGION 1..9: note = Description of Artificial Sequence: Synthetic peptide
YSWTTRYPY

SEQ ID NO: 3065 - protein, 9 aa, synthetic construct
  REGION 1..9: note = Description of Artificial Sequence: Synthetic peptide
YEWTNALPY

SEQ ID NO: 3066 - protein, 9 aa, synthetic construct
  REGION 1..9: note = Description of Artificial Sequence: Synthetic peptide
YSWITRSPY

SEQ ID NO: 3067 - protein, 9 aa, synthetic construct
  REGION 1..9: note = Description of Artificial Sequence: Synthetic peptide
YSWTTRRQY

SEQ ID NO: 3068 - protein, 6 aa, synthetic construct
  REGION 1..6: note = Description of Artificial Sequence: Synthetic peptide
QDGNEE

SEQ ID NO: 3069 - protein, 9 aa, synthetic construct
  REGION 1..9: note = Description of Artificial Sequence: Synthetic peptide
YSWITRSPY

SEQ ID NO: 3070 - protein, 9 aa, synthetic construct
  REGION 1..9: note = Description of Artificial Sequence: Synthetic peptide
YRWEESRQY

SEQ ID NO: 3071 - protein, 9 aa, synthetic construct
  REGION 1..9: note = Description of Artificial Sequence: Synthetic peptide
YTWTTRLPY

SEQ ID NO: 3072 - protein, 9 aa, synthetic construct
  REGION 1..9: note = Description of Artificial Sequence: Synthetic peptide
YRWEESRQY

SEQ ID NO: 3073 - protein, 9 aa, synthetic construct
  REGION 1..9: note = Description of Artificial Sequence: Synthetic peptide
YSWTTRQPY

SEQ ID NO: 3074 - protein, 9 aa, synthetic construct
  REGION 1..9: note = Description of Artificial Sequence: Synthetic peptide
YVWGTRLPY

SEQ ID NO: 3075 - protein, 9 aa, synthetic construct
  REGION 1..9: note = Description of Artificial Sequence: Synthetic peptide
YEWTNALPY

SEQ ID NO: 3076 - protein, 9 aa, synthetic construct
  REGION 1..9: note = Description of Artificial Sequence: Synthetic peptide
YRWEDALTY

SEQ ID NO: 3077 - protein, 9 aa, synthetic construct
  REGION 1..9: note = Description of Artificial Sequence: Synthetic peptide
YSWTTRYPY

SEQ ID NO: 3078 - protein, 9 aa, synthetic construct
  REGION 1..9: note = Description of Artificial Sequence: Synthetic peptide
YSWIDSLRY

SEQ ID NO: 3079 - protein, 9 aa, synthetic construct
  REGION 1..9: note = Description of Artificial Sequence: Synthetic peptide
YSWTTPRAY

SEQ ID NO: 3080 - protein, 9 aa, synthetic construct
  REGION 1..9: note = Description of Artificial Sequence: Synthetic peptide
YSWTTSLPY

SEQ ID NO: 3081 - protein, 10 aa, synthetic construct
  REGION 1..10: note = Description of Artificial Sequence: Synthetic peptide
GFTFNKYAMN

SEQ ID NO: 3082 - protein, 18 aa, synthetic construct
  REGION 1..18: note = Description of Artificial Sequence: Synthetic peptide
RIRSKYNNYATYYADSVK

SEQ ID NO: 3083 - protein, 14 aa, synthetic construct
  REGION 1..14: note = Description of Artificial Sequence: Synthetic peptide
HGNFGNSYISYWAY

SEQ ID NO: 3084 - protein, 14 aa, synthetic construct
  REGION 1..14: note = Description of Artificial Sequence: Synthetic peptide
GSSTGAVTSGNYPN

SEQ ID NO: 3085 - protein, 7 aa, synthetic construct
  REGION 1..7: note = Description of Artificial Sequence: Synthetic peptide
GTKFLAP

SEQ ID NO: 3086 - protein, 9 aa, synthetic construct
  REGION 1..9: note = Description of Artificial Sequence: Synthetic peptide
VLWYSNRWV

SEQ ID NO: 3087 - protein, 10 aa, synthetic construct
  REGION 1..10: note = Description of Artificial Sequence: Synthetic peptide
GNTFNKYAMN

SEQ ID NO: 3088 - protein, 10 aa, synthetic construct
  REGION 1..10: note = Description of Artificial Sequence: Synthetic peptide
GFEFNKYAMN

SEQ ID NO: 3089 - protein, 10 aa, synthetic construct
  REGION 1..10: note = Description of Artificial Sequence: Synthetic peptide
GFMFNKYAMN

SEQ ID NO: 3090 - protein, 10 aa, synthetic construct
  REGION 1..10: note = Description of Artificial Sequence: Synthetic peptide
GFTYNKYAMN

SEQ ID NO: 3091 - protein, 10 aa, synthetic construct
  REGION 1..10: note = Description of Artificial Sequence: Synthetic peptide
GFTFNNYAMN

SEQ ID NO: 3092 - protein, 10 aa, synthetic construct
  REGION 1..10: note = Description of Artificial Sequence: Synthetic peptide
GFTFNGYAMN

SEQ ID NO: 3093 - protein, 10 aa, synthetic construct
  REGION 1..10: note = Description of Artificial Sequence: Synthetic peptide
GFTFNTYAMN

SEQ ID NO: 3094 - protein, 10 aa, synthetic construct
  REGION 1..10: note = Description of Artificial Sequence: Synthetic peptide
GFTFNEYAMN

SEQ ID NO: 3095 - protein, 10 aa, synthetic construct
  REGION 1..10: note = Description of Artificial Sequence: Synthetic peptide
GFTFNKYPMN

SEQ ID NO: 3096 - protein, 10 aa, synthetic construct
  REGION 1..10: note = Description of Artificial Sequence: Synthetic peptide
GFTFNKYAVN

SEQ ID NO: 3097 - protein, 10 aa, synthetic construct
  REGION 1..10: note = Description of Artificial Sequence: Synthetic peptide
GFTFNKYAIN

SEQ ID NO: 3098 - protein, 10 aa, synthetic construct
  REGION 1..10: note = Description of Artificial Sequence: Synthetic peptide
GFTFNKYALN

SEQ ID NO: 3099 - protein, 18 aa, synthetic construct
  REGION 1..18: note = Description of Artificial Sequence: Synthetic peptide
RIRSGYNNYATYYADSVK

SEQ ID NO: 3100 - protein, 18 aa, synthetic construct
  REGION 1..18: note = Description of Artificial Sequence: Synthetic peptide
RIRSKSNNYATYYADSVK

SEQ ID NO: 3101 - protein, 18 aa, synthetic construct
  REGION 1..18: note = Description of Artificial Sequence: Synthetic peptide
RIRSKYNKYATYYADSVK

SEQ ID NO: 3102 - protein, 18 aa, synthetic construct
  REGION 1..18: note = Description of Artificial Sequence: Synthetic peptide
RIRSKYNNYETYYADSVK

SEQ ID NO: 3103 - protein, 18 aa, synthetic construct
  REGION 1..18: note = Description of Artificial Sequence: Synthetic peptide
RIRSKYNNYATEYADSVK

SEQ ID NO: 3104 - protein, 18 aa, synthetic construct
  REGION 1..18: note = Description of Artificial Sequence: Synthetic peptide
RIRSKYNNYATYYKDSVK

SEQ ID NO: 3105 - protein, 18 aa, synthetic construct
  REGION 1..18: note = Description of Artificial Sequence: Synthetic peptide
RIRSKYNNYATYYADEVK

SEQ ID NO: 3106 - protein, 18 aa, synthetic construct
  REGION 1..18: note = Description of Artificial Sequence: Synthetic peptide
RIRSKYNNYATYYADAVK

SEQ ID NO: 3107 - skipped

SEQ ID NO: 3108 - protein, 18 aa, synthetic construct
  REGION 1..18: note = Description of Artificial Sequence: Synthetic peptide
RIRSKYNNYATYYADQVK

SEQ ID NO: 3109 - protein, 18 aa, synthetic construct
  REGION 1..18: note = Description of Artificial Sequence: Synthetic peptide
RIRSKYNNYATYYADDVK

SEQ ID NO: 3110 - protein, 14 aa, synthetic construct
  REGION 1..14: note = Description of Artificial Sequence: Synthetic peptide
HANFGNSYISYWAY

SEQ ID NO: 3111 - protein, 14 aa, synthetic construct
  REGION 1..14: note = Description of Artificial Sequence: Synthetic peptide
HTNFGNSYISYWAY

SEQ ID NO: 3112 - protein, 14 aa, synthetic construct
  REGION 1..14: note = Description of Artificial Sequence: Synthetic peptide
HGNFNNSYISYWAY

SEQ ID NO: 3113 - protein, 14 aa, synthetic construct
  REGION 1..14: note = Description of Artificial Sequence: Synthetic peptide
HGNFGDSYISYWAY

SEQ ID NO: 3114 - protein, 14 aa, synthetic construct
  REGION 1..14: note = Description of Artificial Sequence: Synthetic peptide
HGNFGNSHISYWAY

SEQ ID NO: 3115 - protein, 14 aa, synthetic construct
  REGION 1..14: note = Description of Artificial Sequence: Synthetic peptide
HGNFGNSPISYWAY

SEQ ID NO: 3116 - protein, 14 aa, synthetic construct
  REGION 1..14: note = Description of Artificial Sequence: Synthetic peptide
HGNFGNSQISYWAY

SEQ ID NO: 3117 - protein, 14 aa, synthetic construct
  REGION 1..14: note = Description of Artificial Sequence: Synthetic peptide
HGNFGNSLISYWAY

SEQ ID NO: 3118 - protein, 14 aa, synthetic construct
  REGION 1..14: note = Description of Artificial Sequence: Synthetic peptide
HGNFGNSGISYWAY

SEQ ID NO: 3119 - protein, 14 aa, synthetic construct
  REGION 1..14: note = Description of Artificial Sequence: Synthetic peptide
HGNFGNSYISYWAT

SEQ ID NO: 3120 - protein, 14 aa, synthetic construct
  REGION 1..14: note = Description of Artificial Sequence: Synthetic peptide
ASSTGAVTSGNYPN

SEQ ID NO: 3121 - protein, 14 aa, synthetic construct
  REGION 1..14: note = Description of Artificial Sequence: Synthetic peptide
GESTGAVTSGNYPN

SEQ ID NO: 3122 - protein, 14 aa, synthetic construct
  REGION 1..14: note = Description of Artificial Sequence: Synthetic peptide
GSYTGAVTSGNYPN

SEQ ID NO: 3123 - protein, 14 aa, synthetic construct
  REGION 1..14: note = Description of Artificial Sequence: Synthetic peptide
GSSFGAVTSGNYPN

SEQ ID NO: 3124 - protein, 14 aa, synthetic construct
  REGION 1..14: note = Description of Artificial Sequence: Synthetic peptide
GSSKGAVTSGNYPN

SEQ ID NO: 3125 - protein, 14 aa, synthetic construct
  REGION 1..14: note = Description of Artificial Sequence: Synthetic peptide
GSSSGAVTSGNYPN

SEQ ID NO: 3126 - protein, 14 aa, synthetic construct
  REGION 1..14: note = Description of Artificial Sequence: Synthetic peptide
GSSTGYVTSGNYPN

SEQ ID NO: 3127 - protein, 14 aa, synthetic construct
  REGION 1..14: note = Description of Artificial Sequence: Synthetic peptide
GSSTGAVVSGNYPN

SEQ ID NO: 3128 - protein, 14 aa, synthetic construct
  REGION 1..14: note = Description of Artificial Sequence: Synthetic peptide
GSSTGAVTDGNYPN

SEQ ID NO: 3129 - protein, 14 aa, synthetic construct
  REGION 1..14: note = Description of Artificial Sequence: Synthetic peptide
GSSTGAVTKGNYPN

SEQ ID NO: 3130 - protein, 14 aa, synthetic construct
  REGION 1..14: note = Description of Artificial Sequence: Synthetic peptide
GSSTGAVTHGNYPN

SEQ ID NO: 3131 - protein, 14 aa, synthetic construct
  REGION 1..14: note = Description of Artificial Sequence: Synthetic peptide
GSSTGAVTVGNYPN

SEQ ID NO: 3132 - protein, 14 aa, synthetic construct
  REGION 1..14: note = Description of Artificial Sequence: Synthetic peptide
GSSTGAVTSGYYPN

SEQ ID NO: 3133 - protein, 7 aa, synthetic construct
  REGION 1..7: note = Description of Artificial Sequence: Synthetic peptide
GIKFLAP

SEQ ID NO: 3134 - protein, 7 aa, synthetic construct
  REGION 1..7: note = Description of Artificial Sequence: Synthetic peptide
GTEFLAP

SEQ ID NO: 3135 - protein, 7 aa, synthetic construct
  REGION 1..7: note = Description of Artificial Sequence: Synthetic peptide
GTYFLAP

SEQ ID NO: 3136 - protein, 7 aa, synthetic construct
  REGION 1..7: note = Description of Artificial Sequence: Synthetic peptide
GTSFLAP

SEQ ID NO: 3137 - protein, 7 aa, synthetic construct
  REGION 1..7: note = Description of Artificial Sequence: Synthetic peptide
GTNFLAP

SEQ ID NO: 3138 - protein, 7 aa, synthetic construct
  REGION 1..7: note = Description of Artificial Sequence: Synthetic peptide
GTKLLAP

SEQ ID NO: 3139 - protein, 7 aa, synthetic construct
  REGION 1..7: note = Description of Artificial Sequence: Synthetic peptide
GTKELAP

SEQ ID NO: 3140 - protein, 7 aa, synthetic construct
  REGION 1..7: note = Description of Artificial Sequence: Synthetic peptide
GTKILAP

SEQ ID NO: 3141 - protein, 7 aa, synthetic construct
  REGION 1..7: note = Description of Artificial Sequence: Synthetic peptide
GTKMLAP

SEQ ID NO: 3142 - protein, 7 aa, synthetic construct
  REGION 1..7: note = Description of Artificial Sequence: Synthetic peptide
GTKVLAP

SEQ ID NO: 3143 - protein, 7 aa, synthetic construct
  REGION 1..7: note = Description of Artificial Sequence: Synthetic peptide
GTKFNAP

SEQ ID NO: 3144 - protein, 7 aa, synthetic construct
  REGION 1..7: note = Description of Artificial Sequence: Synthetic peptide
GTKFGAP

SEQ ID NO: 3145 - protein, 7 aa, synthetic construct
  REGION 1..7: note = Description of Artificial Sequence: Synthetic peptide
GTKFLVP

SEQ ID NO: 3146 - protein, 9 aa, synthetic construct
  REGION 1..9: note = Description of Artificial Sequence: Synthetic peptide
TLWYSNRWV

SEQ ID NO: 3147 - protein, 9 aa, synthetic construct
  REGION 1..9: note = Description of Artificial Sequence: Synthetic peptide
ALWYSNRWV

SEQ ID NO: 3148 - protein, 9 aa, synthetic construct
  REGION 1..9: note = Description of Artificial Sequence: Synthetic peptide
VLWYDNRWV

SEQ ID NO: 3149 - protein, 9 aa, synthetic construct
  REGION 1..9: note = Description of Artificial Sequence: Synthetic peptide
VLWYANRWV

SEQ ID NO: 3150 - protein, 9 aa, synthetic construct
  REGION 1..9: note = Description of Artificial Sequence: Synthetic peptide
VLWYSNSWV

SEQ ID NO: 3151 - protein, 9 aa, synthetic construct
  REGION 1..9: note = Description of Artificial Sequence: Synthetic peptide
VLWYSNRWI

SEQ ID NO: 3152 - protein, 9 aa, synthetic construct
  REGION 1..9: note = Description of Artificial Sequence: Synthetic peptide
VLWYSNRWA

SEQ ID NO: 3153 - protein, 249 aa, synthetic construct
  REGION 1..249: note = Description of Artificial Sequence: Synthetic polypeptide
EVQLVESGGGLVQPGGSLKLSCAASGFTFNKYAINWVRQAPGKGLEWVARIRSKYNNYATYYADQVKDRFTISRDDSKNTAYLQMNNLKTEDTAVYYCVRHANFGNSYISYWAYWGQGTLVTVSSGGGGSGGGGSGGGGSQTVVTQEPSLTVSPGGTVTLTCASSTGAVTSGNYPNWVQQKPGQAPRGLIGGTKFLVPGTPARFSGSLLGGKAALTLSGVQPEDEAEYYCTLWYSNRWVFGGGTKLTVL

SEQ ID NO: 3154 - protein, 249 aa, synthetic construct
  REGION 1..249: note = Description of Artificial Sequence: Synthetic polypeptide
EVQLVESGGGLVQPGGSLKLSCAASGFEFNKYAMNWVRQAPGKGLEWVARIRSKYNKYATYYADSVKDRFTISRDDSKNTAYLQMNNLKTEDTAVYYCVRHGNFGNSYISYWAYWGQGTLVTVSSGGGGSGGGGSGGGGSQTVVTQEPSLTVSPGGTVTLTCGSSFGAVTSGNYPNWVQQKPGQAPRGLIGGTKFLAPGTPARFSGSLLGGKAALTLSGVQPEDEAEYYCVLWYDNRWVFGGGTKLTVL

SEQ ID NO: 3155 - protein, 249 aa, synthetic construct
  REGION 1..249: note = Description of Artificial Sequence: Synthetic polypeptide
EVQLVESGGGLVQPGGSLKLSCAASGFTFNKYAMNWVRQAPGKGLEWVARIRSKYNNYATYYADSVKDRFTISRDDSKNTAYLQMNNLKTEDTAVYYCVRHGNFGNSHISYWAYWGQGTLVTVSSGGGGSGGGGSGGGGSQTVVTQEPSLTVSPGGTVTLTCGSSTGYVTSGNYPNWVQQKPGQAPRGLIGGTSFLAPGTPARFSGSLLGGKAALTLSGVQPEDEAEYYCVLWYSNRWIFGGGTKLTVL

SEQ ID NO: 3156 - protein, 249 aa, synthetic construct
  REGION 1..249: note = Description of Artificial Sequence: Synthetic polypeptide
EVQLVESGGGLVQPGGSLKLSCAASGFMFNKYAMNWVRQAPGKGLEWVARIRSKSNNYATYYADSVKDRFTISRDDSKNTAYLQMNNLKTEDTAVYYCVRHGNFGNSYISYWATWGQGTLVTVSSGGGGSGGGGSGGGGSQTVVTQEPSLTVSPGGTVTLTCGSSFGAVTSGNYPNWVQQKPGQAPRGLIGGTKLLAPGTPARFSGSLLGGKAALTLSGVQPEDEAEYYCVLWYSNSWVFGGGTKLTVL

SEQ ID NO: 3157 - protein, 249 aa, synthetic construct
  REGION 1..249: note = Description of Artificial Sequence: Synthetic polypeptide
EVQLVESGGGLVQPGGSLKLSCAASGFTFNTYAMNWVRQAPGKGLEWVARIRSKYNNYATYYKDSVKDRFTISRDDSKNTAYLQMNNLKTEDTAVYYCVRHGNFGNSPISYWAYWGQGTLVTVSSGGGGSGGGGSGGGGSQTVVTQEPSLTVSPGGTVTLTCGSSTGAVVSGNYPNWVQQKPGQAPRGLIGGTEFLAPGTPARFSGSLLGGKAALTLSGVQPEDEAEYYCVLWYSNRWVFGGGTKLTVL

SEQ ID NO: 3158 - protein, 249 aa, synthetic construct
  REGION 1..249: note = Description of Artificial Sequence: Synthetic polypeptide
EVQLVESGGGLVQPGGSLKLSCAASGFTYNKYAMNWVRQAPGKGLEWVARIRSKYNNYATYYADEVKDRFTISRDDSKNTAYLQMNNLKTEDTAVYYCVRHGNFGNSPISYWAYWGQGTLVTVSSGGGGSGGGGSGGGGSQTVVTQEPSLTVSPGGTVTLTCGSSKGAVTSGNYPNWVQQKPGQAPRGLIGGTKELAPGTPARFSGSLLGGKAALTLSGVQPEDEAEYYCTLWYSNRWVFGGGTKLTVL

SEQ ID NO: 3159 - protein, 249 aa, synthetic construct
  REGION 1..249: note = Description of Artificial Sequence: Synthetic polypeptide
EVQLVESGGGLVQPGGSLKLSCAASGNTFNKYAMNWVRQAPGKGLEWVARIRSKYNNYETYYADSVKDRFTISRDDSKNTAYLQMNNLKTEDTAVYYCVRHTNFGNSYISYWAYWGQGTLVTVSSGGGGSGGGGSGGGGSQTVVTQEPSLTVSPGGTVTLTCGSSTGAVTSGYYPNWVQQKPGQAPRGLIGGTYFLAPGTPARFSGSLLGGKAALTLSGVQPEDEAEYYCVLWYSNRWVFGGGTKLTVL

SEQ ID NO: 3160 - protein, 249 aa, synthetic construct
  REGION 1..249: note = Description of Artificial Sequence: Synthetic polypeptide
EVQLVESGGGLVQPGGSLKLSCAASGFTFNNYAMNWVRQAPGKGLEWVARIRSKYNNYATYYADAVKDRFTISRDDSKNTAYLQMNNLKTEDTAVYYCVRHGNFGNSQISYWAYWGQGTLVTVSSGGGGSGGGGSGGGGSQTVVTQEPSLTVSPGGTVTLTCGSSTGAVTDGNYPNWVQQKPGQAPRGLIGGIKFLAPGTPARFSGSLLGGKAALTLSGVQPEDEAEYYCVLWYSNRWVFGGGTKLTVL

SEQ ID NO: 3161 - protein, 249 aa, synthetic construct
  REGION 1..249: note = Description of Artificial Sequence: Synthetic polypeptide
EVQLVESGGGLVQPGGSLKLSCAASGFTFNKYAVNWVRQAPGKGLEWVARIRSKYNNYATYYADSVKDRFTISRDDSKNTAYLQMNNLKTEDTAVYYCVRHGNFGNSYISYWAYWGQGTLVTVSSGGGGSGGGGSGGGGSQTVVTQEPSLTVSPGGTVTLTCGESTGAVTSGNYPNWVQQKPGQAPRGLIGGTKILAPGTPARFSGSLLGGKAALTLSGVQPEDEAEYYCVLWYSNRWVFGGGTKLTVL

SEQ ID NO: 3162 - protein, 249 aa, synthetic construct
  REGION 1..249: note = Description of Artificial Sequence: Synthetic polypeptide
EVQLVESGGGLVQPGGSLKLSCAASGFTFNKYPMNWVRQAPGKGLEWVARIRSKYNNYATYYADSVKDRFTISRDDSKNTAYLQMNNLKNEDTAVYYCVRHGNFNNSYISYWAYWGQGTLVTVSSGGGGSGGGGSGGGGSQTVVTQEPSLTVSPGGTVTLTCGSSTGAVTKGNYPNWVQQKPGQAPRGLIGGTKMLAPGTPARFSGSLLGGKAALTLSGVQPEDEAEYYCALWYSNRWVFGGGTKLTVL

SEQ ID NO: 3163 - protein, 249 aa, synthetic construct
  REGION 1..249: note = Description of Artificial Sequence: Synthetic polypeptide
EVQLVESGGGLVQPGGSLKLSCAASGFTFNGYAMNWVRQAPGKGLEWVARIRSKYNNYATYYADEVKDRFTISRDDSKNTAYLQMNNLKTEDTAVYYCVRHGNFGNSPISYWAYWGQGTLVTVSSGGGGSGGGGSGGGGSQTVVTQEPSLTVSPGGTVTLTCGSSTGAVVSGNYPNWVQQKPGQAPRGLIGGTEFLAPGTPARFSGSLLGGKAALTLSGVQPEDEAEYYCVLWYSNRWVFGGGTKLTVL

SEQ ID NO: 3164 - protein, 249 aa, synthetic construct
  REGION 1..249: note = Description of Artificial Sequence: Synthetic polypeptide
EVQLVESGGGLVQPGGSLKLSCAASGNTFNKYAMNWVRQAPGKGLEWVARIRSKYNNYATYYADSVKDRFTISRDDSKNTAYLQMNNLKTEDTAVYYCVRHGNFGDSYISYWAYWGQGTLVTVSSGGGGSGGGGSGGGGSQTVVTQEPSLTVSPGGTVTLTCGSSTGAVTHGNYPNWVQQKPGQAPRGLIGGTKVLAPGTPARFSGSLLGGKAALTLSGVQPEDEAEYYCVLWYSNRWVFGGGTKLTVL

SEQ ID NO: 3165 - protein, 249 aa, synthetic construct
  REGION 1..249: note = Description of Artificial Sequence: Synthetic polypeptide
EVQLVESGGGLVQPGGSLKLSCAASGFTFNNYAMNWVRQAPGKGLEWVARIRSGYNNYATYYADSVKDRFTISRDDSKNTAYLQMNNLKTEDTAVYYCVRHGNFGNSYISYWAYWGQGTLVTVSSGGGGSGGGGSGGGGSQTVVTQEPSLTVSPGGTVTLTCGSYTGAVTSGNYPNWVQQKPGQAPRGLIGGTKFNAPGTPARFSGSLLGGKAALTLSGVQPEDEAEYYCVLWYANRWVFGGGTKLTVL

SEQ ID NO: 3166 - protein, 249 aa, synthetic construct
  REGION 1..249: note = Description of Artificial Sequence: Synthetic polypeptide
EVQLVESGGGLVQPGGSLKLSCAASGFEFNKYAMNWVRQAPGKGLEWVARIRSKYNNYETYYADSVKDRFTISRDDSKNTAYLQMNNLKTEDTAVYYCVRHGNFGNSLISYWAYWGQGTLVTVSSGGGGSGGGGSGGGGSQTVVTQEPSLTVSPGGTVTLTCGSSSGAVTSGNYPNWVQQKPGQAPRGLIGGTKFGAPGTPARFSGSLLGGKAALTLSGVQPEDEAEYYCVLWYSNRWVFGGGTKLTVL

SEQ ID NO: 3167 - protein, 249 aa, synthetic construct
  REGION 1..249: note = Description of Artificial Sequence: Synthetic polypeptide
EVQLVESGGGLVQPGGSLKLSCAASGFTFNKYAMNWVRQAPGKGLEWVARIRSKYNNYATYYADSVKDRFTISRDDSKNTAYLQMNNLKTEDTAVYYCVRHGNFGNSYISYWAYWGQGTLVTVSSGGGGSGGGGSGGGGSQTVVTQEPSLTVSPGGTVTLTCGSSTGAVTSGNYPNWVQQKPGQAPRGLIGGTKFLAPGTPARFSGSLLGGKAALTLSGVQPEDEAEYYCVLWYSNRWVFGGGTKLTVL

SEQ ID NO: 3168 - protein, 249 aa, synthetic construct
  REGION 1..249: note = Description of Artificial Sequence: Synthetic polypeptide
EVQLVESGGGLVQPGGSLKLSCAASGFTFNKYALNWVRQAPGKGLEWVARIRSKYNNYATEYADSVKDRFTISRDDSKNTAYLQMNNLKTEDTAVYYCVRHGNFGNSPISYWAYWGQGTLVTVSSGGGGSGGGGSGGGGSQTVVTQEPSLTVSPGGTVTLTCGSSTGAVTSGNYPNWVQQKPGQAPRGLIGGTNFLAPGTPERFSGSLLGGKAALTLSGVQPEDEAEYYCVLWYSNRWAFGGGTKLTVL

SEQ ID NO: 3169 - protein, 249 aa, synthetic construct
  REGION 1..249: note = Description of Artificial Sequence: Synthetic polypeptide
EVQLVESGGGLVQPGGSLKLSCAASGFTFNEYAMNWVRQAPGKGLEWVARIRSKYNNYATYYADDVKDRFTISRDDSKNTAYLQMNNLKTEDTAVYYCVRHGNFGNSGISYWAYWGQGTLVTVSSGGGGSGGGGSGGGGSQTVVTQEPSLTVSPGGTVTLTCGSSTGAVTVGNYPNWVQQKPGQAPRGLIGGTEFLAPGTPARFSGSLLGGKAALTLSGVQPEDEAEYYCVLWYSNRWVFGGGTKLTVL

SEQ ID NO: 3170 - protein, 10 aa, synthetic construct
  REGION 1..10: note = Description of Artificial Sequence: Synthetic peptide
GFTFSSFGMS

SEQ ID NO: 3171 - protein, 16 aa, synthetic construct
  REGION 1..16: note = Description of Artificial Sequence: Synthetic peptide
SISGSGSDTLYADSVK

SEQ ID NO: 3172 - protein, 6 aa, synthetic construct
  REGION 1..6: note = Description of Artificial Sequence: Synthetic peptide
GGSLSR

SEQ ID NO: 3173 - protein, 10 aa, synthetic construct
  REGION 1..10: note = Description of Artificial Sequence: Synthetic peptide
GFTFSRFGMS

SEQ ID NO: 3174 - protein, 10 aa, synthetic construct
  REGION 1..10: note = Description of Artificial Sequence: Synthetic peptide
GFTFSKFGMS

SEQ ID NO: 3175 - protein, 10 aa, synthetic construct
  REGION 1..10: note = Description of Artificial Sequence: Synthetic peptide
GFTYSSFGMS

SEQ ID NO: 3176 - protein, 16 aa, synthetic construct
  REGION 1..16: note = Description of Artificial Sequence: Synthetic peptide
SISGSGADTLYADSLK

SEQ ID NO: 3177 - protein, 16 aa, synthetic construct
  REGION 1..16: note = Description of Artificial Sequence: Synthetic peptide
SISGSGTDTLYADSVK

SEQ ID NO: 3178 - protein, 16 aa, synthetic construct
  REGION 1..16: note = Description of Artificial Sequence: Synthetic peptide
SISGSGRDTLYADSVK

SEQ ID NO: 3179 - protein, 16 aa, synthetic construct
  REGION 1..16: note = Description of Artificial Sequence: Synthetic peptide
SISGSGSDTLYAESVK

SEQ ID NO: 3180 - protein, 16 aa, synthetic construct
  REGION 1..16: note = Description of Artificial Sequence: Synthetic peptide
SISGSGTDTLYAESVK

SEQ ID NO: 3181 - protein, 16 aa, synthetic construct
  REGION 1..16: note = Description of Artificial Sequence: Synthetic peptide
SISGSGRDTLYAESVK

SEQ ID NO: 3182 - protein, 6 aa, synthetic construct
  REGION 1..6: note = Description of Artificial Sequence: Synthetic peptide
GGSLSK

SEQ ID NO: 3183 - protein, 6 aa, synthetic construct
  REGION 1..6: note = Description of Artificial Sequence: Synthetic peptide
GGSLSV

SEQ ID NO: 3184 - protein, 115 aa, synthetic construct [sequence omitted]

SEQ ID NO: 3185 - protein, 115 aa, synthetic construct
  REGION 1..115: note = Description of Artificial Sequence: Synthetic polypeptide
EVQLVESGGGLVQPGNSLRLSCAASGFTFSRFGMSWVRQAPGKGLEWVSSISGSGSDTLYADSVKGRFTISRDNAKTTLYLQMNSLRPEDTAVYYCTIGGSLSRSSQGTLVTVSS

SEQ ID NO: 3186 - protein, 115 aa, synthetic construct
  REGION 1..115: note = Description of Artificial Sequence: Synthetic polypeptide
EVQLVESGGGLVQPGNSLRLSCAASGFTFSKFGMSWVRQAPGKGLEWVSSISGSGADTLYADSLKGRFTISRDNAKTTLYLQMNSLRPEDTAVYYCTIGGSLSKSSQGTLVTVSS

SEQ ID NO: 3187 - protein, 115 aa, synthetic construct
  REGION 1..115: note = Description of Artificial Sequence: Synthetic polypeptide
EVQLVESGGGLVQPGNSLRLSCAASGFTYSSFGMSWVRQAPGKGLEWVSSISGSGSDTLYADSVKGRFTISRDNAKTTLYLQMNSLRPEDTAVYYCTIGGSLSKSSQGTLVTVSS

SEQ ID NO: 3188 - protein, 115 aa, synthetic construct
  REGION 1..115: note = Description of Artificial Sequence: Synthetic polypeptide
EVQLVESGGGLVQPGNSLRLSCAASGFTFSKFGMSWVRQAPGKGLEWVSSISGSGTDTLYADSVKGRFTISRDNAKTTLYLQMNSLRPEDTAVYYCTIGGSLSRSSQGTLVTVSS

SEQ ID NO: 3189 - protein, 115 aa, synthetic construct
  REGION 1..115: note = Description of Artificial Sequence: Synthetic polypeptide
EVQLVESGGGLVQPGNSLRLSCAASGFTFSRFGMSWVRQAPGKGLEWVSSISGSGSDTLYADSVKGRFTISRDNAKTTLYLQMNSLRPEDTAVYYCTIGGSLSKSSQGTLVTVSS

SEQ ID NO: 3190 - protein, 115 aa, synthetic construct
  REGION 1..115: note = Description of Artificial Sequence: Synthetic polypeptide
EVQLVESGGGLVQPGNSLRLSCAASGFTFSKFGMSWVRQAPGKGLEWVSSISGSGRDTLYADSVKGRFTISRDNAKTTLYLQMNSLRPEDTAVYYCTIGGSLSVSSQGTLVTVSS

SEQ ID NO: 3191 - protein, 115 aa, synthetic construct
  REGION 1..115: note = Description of Artificial Sequence: Synthetic polypeptide
EVQLVESGGGLVQPGNSLRLSCAASGFTFSRFGMSWVRQAPGKGLEWVSSISGSGSDTLYAESVKGRFTISRDNAKTTLYLQMNSLRPEDTAVYYCTIGGSLSRSSQGTLVTVSS

SEQ ID NO: 3192 - protein, 115 aa, synthetic construct
  REGION 1..115: note = Description of Artificial Sequence: Synthetic polypeptide
EVQLVESGGGLVQPGNSLRLSCAASGFTFSKFGMSWVRQAPGKGLEWVSSISGSGTDTLYAESVKGRFTISRDNAKTTLYLQMNSLRPEDTAVYYCTIGGSLSRSSQGTLVTVSS

SEQ ID NO: 3193 - protein, 115 aa, synthetic construct
  REGION 1..115: note = Description of Artificial Sequence: Synthetic polypeptide
EVQLVESGGGLVQPGNSLRLSCAASGFTFSKFGMSWVRQAPGKGLEWVSSISGSGRDTLYAESVKGRFTISRDNAKTTLYLQMNSLRPEDTAVYYCTIGGSLSVSSQGTLVTVSS

SEQ ID NO: 3194-3199 - skipped (6 entries)

SEQ ID NO: 3200 - protein, 5 aa, synthetic construct
  REGION 1..5: note = Description of Artificial Sequence: Synthetic peptide
LPETG

SEQ ID NO: 3201 - protein, 184 aa, Homo sapiens
MLQMAGQCSQNEYFDSLLHACIPCQLRCSSNTPPLTCQRYCNASVTNSVKGTNAILWTCLGLSLIISLAVFVLMFLLRKINSEPLKDEFKNTGSGLLGMANIDLEKSRTGDEIILPRGLEYTVEECTCEDCIKSKPKVDSDHCFPLPAMEEGATILVTTKTNDYCKSLPAALSATEIEKSISAR

SEQ ID NO: 3202 - protein, 185 aa, Mus musculus
MAQQCFHSEYFDSLLHACKPCHLRCSNPPATCQPYCDPSVTSSVKGTYTVLWIFLGLTLVLSLALFTISFLLRKMNPEALKDEPQSPGQLDGSAQLDKADTELTRIRAGDDRIFPRSLEYTVEECTCEDCVKSKPKGDSDHFFPLPAMEEGATILVTTKTGDYGKSSVPTALQSVMGMEKPTHTR

SEQ ID NO: 3203 - protein, 183 aa, Macaca fascicularis
MLQMARQCSQNEYFDSLLHDCKPCQLRCSSTPPLTCQRYCNASMTNSVKGMNAILWTCLGLSLIISLAVFVLTFLLRKMSSEPLKDEFKNTGSGLLGMANIDLEKGRTGDEIVLPRGLEYTVEECTCEDCIKNKPKVDSDHCFPLPAMEEGATILVTTKTNDYCNSLSAALSVTEIEKSISAR

SEQ ID NO: 3204 - protein, 630 aa, unidentified
  REGION 1..630: note = Description of Unknown: Mesothelin peptide sequence
MALPTARPLLGSCGTPALGSLLFLLFSLGWVQPSRTLAGETGQEAAPLDGVLANPPNISSLSPRQLLGFPCAEVSGLSTERVRELAVALAQKNVKLSTEQLRCLAHRLSEPPEDLDALPLDLLLFLNPDAFSGPQACTRFFSRITKANVDLLPRGAPERQRLLPAALACWGVRGSLLSEADVRALGGLACDLPGRFVAESAEVLLPRLVSCPGPLDQDQQEAARAALQGGGPPYGPPSTWSVSTMDALRGLLPVLGQPIIRSIPQGIVAAWRQRSSRDPSWRQPERTILRPRFRREVEKTACPSGKKAREIDESLIFYKKWELEACVDAALLATQMDRVNAIPFTYEQLDVLKHKLDELYPQGYPESVIQHLGYLFLKMSPEDIRKWNVTSLETLKALLEVNKGHEMSPQAPRRPLPQVATLIDRFVKGRGQLDKDTLDTLTAFYPGYLCSLSPEELSSVPPSSIWAVRPQDLDTCDPRQLDVLYPKARLAFQNMNGSEYFVKIQSFLGGAPTEDLKALSQQNVSMDLATFMKLRTDAVLPLTVAEVQKLLGPHVEGLKAEERHRPVRDWILRQRQDDLDTLGLGLQGGIPNGYLVLDLSMQEALSGTPCLLGPGPVLTVLALLLASTLA

SEQ ID NO: 3205 - protein, 1091 aa, Homo sapiens
MRPSGTAGAALLALLAALCPASRALEEKKVCQGTSNKLTQLGTFEDHFLSLQRMFNNCEVVLGNLEITYVQRNYDLSFLKTIQEVAGYVLIALNTVERIPLENLQIIRGNMYYENSYALAVLSNYDANKTGLKELPMRNLQGQKCDPSCPNGSCWGAGEENCQKLTKIICAQQCSGRCRGKSPSDCCHNQCAAGCTGPRESDCLVCRKFRDEATCKDTCPPLMLYNPTTYQMDVNPEGKYSFGATCVKKCPRNYVVTDHGSCVRACGADSYEMEEDGVRKCKKCEGPCRKVCNGIGIGEFKDSLSINATNIKHFKNCTSISGDLHILPVAFRGDSFTHTPPLDPQELDILKTVKEITGFLLIQAWPENRTDLHAFENLEIIRGRTKQHGQFSLAVVSLNITSLGLRSLKEISDGDVIISGNKNLCYANTINWKKLFGTSGQKTKIISNRGENSCKATGQVCHALCSPEGCWGPEPRDCVSCRNVSRGRECVDKCNLLEGEPREFVENSECIQCHPECLPQAMNITCTGRGPDNCIQCAHYIDGPHCVKTCPAGVMGENNTLVWKYADAGHVCHLCHPNCTYGCTGPGLEGCPTNGPKIPSIATGMVGALLLLLVVALGIGLFMRRRHIVRKRTLRRLLQERELVEPLTPSGEAPNQALLRILKETEFKKIKVLGSGAFGTVYKGLWIPEGEKVKIPVAIKELREATSPKANKEILDEAYVMASVDNPHVCRLLGICLTSTVQLITQLMPFGCLLDYVREHKDNIGSQYLLNWCVQIAKGMNYLEDRRLVHRDLAARNVLVKTPQHVKITDFGLAKLLGAEEKEYHAEGGKVPIKWMALESILHRIYTHQSDVWSYGVTVWELMTFGSKPYDGIPASEISSILEKGERLPQPPICTIDVYMIMVKCWMIDADSRPKFRELIIEFSKMARDPQRYLVIQGDERMHLPSPTDSNFYRALMDEEDMDDVVDADEYLIPQQGFFSSPSTSRTPLLSSLSATSNNSTVACIDRNGLQSCPIKEDSFLQRYSSDPTGALTEDSIDDTFLPVPGEWLVWKQSCSSTSSTHSAAASLQCPSQVLPPASPEGETVADLQTQ

SEQ ID NO: 3206 - protein, 1210 aa, Mus musculus
MRPSGTARTTLLVLLTALCAAGGALEEKKVCQGTSNRLTQLGTFEDHFLSLQRMYNNCEVVLGNLEITYVQRNYDLSFLKTIQEVAGYVLIALNTVERIPLENLQIIRGNALYENTYALAILSNYGTNRTGLRELPMRNLQEILIGAVRFSNNPILCNMDTIQWRDIVQNVFMSNMSMDLQSHPSSCPKCDPSCPNGSCWGGGEENCQKLTKIICAQQCSHRCRGRSPSDCCHNQCAAGCTGPRESDCLVCQKFQDEATCKDTCPPLMLYNPTTYQMDVNPEGKYSFGATCVKKCPRNYVVTDHGSCVRACGPDYYEVEEDGIRKCKKCDGPCRKVCNGIGIGEFKDTLSINATNIKHFKYCTAISGDLHILPVAFKGDSFTRTPPLDPRELEILKTVKEITGFLLIQAWPDNWTDLHAFENLEIIRGRTKQHGQFSLAVVGLNITSLGLRSLKEISDGDVIISGNRNLCYANTINWKKLFGTPNQKTKIMNNRAEKDCKAVNHVCNPLCSSEGCWGPEPRDCVSCQNVSRGRECVEKCNILEGEPREFVENSECIQCHPECLPQAMNITCTGRGPDNCIQCAHYIDGPHCVKTCPAGIMGENNTLVWKYADANNVCHLCHANCTYGCAGPGLQGCEVWPSGPKIPSIATGIVGGLLFIVVVALGIGLFMRRRHIVRKRTLRRLLQERELVEPLTPSGEAPNQAHLRILKETEFKKIKVLGSGAFGTVYKGLWIPEGEKVKIPVAIKELREATSPKANKEILDEAYVMASVDNPHVCRLLGICLTSTVQLITQLMPYGCLLDYVREHKDNIGSQYLLNWCVQIAKGMNYLEDRRLVHRDLAARNVLVKTPQHVKITDFGLAKLLGAEEKEYHAEGGKVPIKWMALESILHRIYTHQSDVWSYGVTVWELMTFGSKPYDGIPASDISSILEKGERLPQPPICTIDVYMIMVKCWMIDADSRPKFRELILEFSKMARDPQRYLVIQGDERMHLPSPTDSNFYRALMDEEDMEDVVDADEYLIPQQGFFNSPSTSRTPLLSSLSATSNNSTVACINRNGSCRVKEDAFLQRYSSDPTGAVTEDNIDDAFLPVPEYVNQSVPKRPAGSVQNPVYHNQPLHPAPGRDLHYQNPHSNAVGNPEYLNTAQPTCLSSGFNSPALWIQKGSHQMSLDNPDYQQDFFPKETKPNGIFKGPTAENAEYLRVAPPSSEFIGA

SEQ ID NO: 3207 - protein, 1210 aa, Macaca fascicularis
MRPSGTAGAALLALLAALCPASRALEEKKVCQGTSNKLTQLGTFEDHFLSLQRMFNNCEVVLGNLEITYVQRNYDLSFLKTIQEVAGYVLIALNTVERIPLENLQIIRGNMYYENSYALAVLSNYDANKTGLKELPMRNLQEILHGAVRFSNNPALCNVESIQWRDIVSSEFLSNMSMDFQNHLGSCQKCDPSCPNGSCWGAGEENCQKLTKIICAQQCSGRCRGKSPSDCCHNQCAAGCTGPRESDCLVCRKFRDEATCKDTCPPLMLYNPTTYQMDVNPEGKYSFGATCVKKCPRNYVVTDHGSCVRACGADSYEMEEDGVRKCKKCEGPCRKVCNGIGIGEFKDTLSINATNIKHFKNCTSISGDLHILPVAFRGDSFTHTPPLDPQELDILKTVKEITGFLLIQAWPENRTDLHAFENLEIIRGRTKQHGQFSLAVVSLNITSLGLRSLKEISDGDVIISGNKNLCYANTINWKKLFGTSSQKTKIISNRGENSCKATGQVCHALCSPEGCWGPEPRDCVSCQNVSRGRECVDKCNILEGEPREFVENSECIQCHPECLPQVMNITCTGRGPDNCIQCAHYIDGPHCVKTCPAGVMGENNTLVWKYADAGHVCHLCHPNCTYGCTGPGLEGCARNGPKIPSIATGMVGALLLLLVVALGIGLFMRRRHIVRKRTLRRLLQERELVEPLTPSGEAPNQALLRILKETEFKKIKVLGSGAFGTVYKGLWIPEGEKVKIPVAIKELREATSPKANKEILDEAYVMASVDNPHVCRLLGICLTSTVQLITQLMPFGCLLDYVREHKDNIGSQYLLNWCVQIAKGMNYLEDRRLVHRDLAARNVLVKTPQHVKITDFGLAKLLGAEEKEYHAEGGKVPIKWMALESILHRIYTHQSDVWSYGVTVWELMTFGSKPYDGIPASEISSILEKGERLPQPPICTIDVYMIMVKCWMIDADSRPKFRELIIEFSKMARDPQRYLVIQGDERMHLPSPTDSNFYRALMDEEDMDDVVDADEYLIPQQGFFSSPSTSRTPLLSSLSATSNNSTVACIDRNGLQSCPIKEDSFLQRYSSDPTGALTEDSIDDTFLPVPEYINQSVPKRPAGSVQNPVYHNQPLNPAPSRDPHYQDPHSTAVGNPEYLNTVQPTCVNSTFDSPAHWAQKGSHQISLDNPDYQQDFFPKEAKPNGIFKGSTAENAEYLRVAPQSSEFIGA

SEQ ID NO: 3208 - protein, 342 aa, Homo sapiens
METKHLGRGGAGRAGPHLWRGPRPNCSAGAGGGEPTHSPNSRAVTHQRAPAARECVCENYKLAVNCFVNNNRQCQCTSVGAQNTVICSKLAAKCLVMKAEMNGSKLGRRAKPEGALQNNDGLYDPDCDESGLFKAKQCNGTSMCWCVNTAGVRRTDKDTEITCSERVRTYWIIIELKHKAREKPYDSKSLRTALQKEITTRYQLDPKFITSILYENNVITIDLVQNSSQKTQNDVDIADVAYYFEKDVKGESLFHSKKMDLTVNGEQLDLDPGQTLIYYVDEKAPEFSMQGLKAGVIAVIVVVVIAVVAGIVVLVISRKKRMAKYEKAEIKEMGEMHRELNA

SEQ ID NO: 3209 - protein, 288 aa, Macaca fascicularis
CVCENYKLAVNCFLNDNGQCQCTSIGAQNTVLCSKLAAKCLVMKAEMNGSKLGRRAKPEGALQNNDGLYDPDCDESGLFKAKQCNGTSTCWCVNTAGVRRTDKDTEITCSERVRTYWIIIELKHKAREKPYDVQSLRTALEEAIKTRYQLDPKFITNILYEDNVITIDLVQNSSQKTQNDVDIADVAYYFEKDVKGESLFHSKKMDLRVNGEQLDLDPGQTLIYYVDEKAPEFSMQGLKAGVIAVIVVVVIAIVAGIVVLVISRKKRMAKYEKAEIKEMGEIHRELNA

SEQ ID NO: 3210 - protein, 315 aa, Mus musculus
MAGPQALAFGLLLAVVTATLAAAQRDCVCDNYKLATSCSLNEYGECQCTSYGTQNTVICSKLASKCLAMKAEMTHSKSGRRIKPEGAIQNNDGLYDPDCDEQGLFKAKQCNGTATCWCVNTAGVRRTDKDTEITCSERVRTYWIIIELKHKERESPYDHQSLQTALQEAFTSRYKLNQKFIKNIMYENNVITIDLMQNSSQKTQDDVDIADVAYYFEKDVKGESLFHSSKSMDLRVNGEPLDLDPGQTLIYYVDEKAPEFSMQGLTAGIIAVIVVVSLAVIAGIVVLVISTRKKSAKYEKAEIKEMGEIHRELNA

SEQ ID NO: 3211 - protein, 314 aa, Homo sapiens
MAPPQVLAFGLLLAAATATFAAAQEECVCENYKLAVNCFVNNNRQCQCTSVGAQNTVICSKLAAKCLVMKAEMNGSKLGRRAKPEGALQNNDGLYDPDCDESGLFKAKQCNGTSMCWCVNTAGVRRTDKDTEITCSERVRTYWIIIELKHKAREKPYDSKSLRTALQKEITTRYQLDPKFITSILYENNVITIDLVQNSSQKTQNDVDIADVAYYFEKDVKGESLFHSKKMDLTVNGEQLDLDPGQTLIYYVDEKAPEFSMQGLKAGVIAVIVVVVIAVVAGIVVLVISRKKRMAKYEKAEIKEMGEMHRELNA

SEQ ID NO: 3212 - protein, 242 aa, Homo sapiens
QEECVCENYKLAVNCFVNNNRQCQCTSVGAQNTVICSKLAAKCLVMKAEMNGSKLGRRAKPEGALQNNDGLYDPDCDESGLFKAKQCNGTSMCWCVNTAGVRRTDKDTEITCSERVRTYWIIIELKHKAREKPYDSKSLRTALQKEITTRYQLDPKFITSILYENNVITIDLVQNSSQKTQNDVDIADVAYYFEKDVKGESLFHSKKMDLTVNGEQLDLDPGQTLIYYVDEKAPEFSMQGLK

SEQ ID NO: 3213 - protein, 242 aa, Macaca fascicularis
QKECVCENYKLAVNCFLNDNGQCQCTSIGAQNTVLCSKLAAKCLVMKAEMNGSKLGRRAKPEGALQNNDGLYDPDCDESGLFKAKQCNGTSTCWCVNTAGVRRTDKDTEITCSERVRTYWIIIELKHKAREKPYDVQSLRTALEEAIKTRYQLDPKFITNILYEDNVITIDLVQNSSQKTQNDVDIADVAYYFEKDVKGESLFHSKKMDLRVNGEQLDLDPGQTLIYYVDEKAPEFSMQGLK

SEQ ID NO: 3214 - protein, 243 aa, Mus musculus
QRDCVCDNYKLATSCSLNEYGECQCTSYGTQNTVICSKLASKCLAMKAEMTHSKSGRRIKPEGAIQNNDGLYDPDCDEQGLFKAKQCNGTATCWCVNTAGVRRTDKDTEITCSERVRTYWIIIELKHKERESPYDHQSLQTALQEAFTSRYKLNQKFIKNIMYENNVITIDLMQNSSQKTQDDVDIADVAYYFEKDVKGESLFHSSKSMDLRVNGEPLDLDPGQTLIYYVDEKAPEFSMQGLT

SEQ ID NO: 3215 - protein, 993 aa, Homo sapiens
MPALARDGGQLPLLVVFSAMIFGTITNQDLPVIKCVLINHKNNDSSVGKSSSYPMVSESPEDLGCALRPQSSGTVYEAAAVEVDVSASITLQVLVDAPGNISCLWVFKHSSLNCQPHFDLQNRGVVSMVILKMTETQAGEYLLFIQSEATNYTILFTVSIRNTLLYTLRRPYFRKMENQDALVCISESVPEPIVEWVLCDSQGESCKEESPAVVKKEEKVLHELFGTDIRCCARNELGRECTRLFTIDLNQTPQTTLPQLFLKVGEPLWIRCKAVHVNHGFGLTWELENKALEEGNYFEMSTYSTNRTMIRILFAFVSSVARNDTGYYTCSSSKHPSQSALVTIVEKGFINATNSSEDYEIDQYEEFCFSVRFKAYPQIRCTWTFSRKSFPCEQKGLDNGYSISKFCNHKHQPGEYIFHAENDDAQFTKMFTLNIRRKPQVLAEASASQASCFSDGYPLPSWTWKKCSDKSPNCTEEITEGVWNRKANRKVFGQWVSSSTLNMSEAIKGFLVKCCAYNSLGTSCETILLNSPGPFPFIQDNISFYATIGVCLLFIVVLTLLICHKYKKQFRYESQLQMVQVTGSSDNEYFYVDFREYEYDLKWEFPRENLEFGKVLGSGAFGKVMNATAYGISKTGVSIQVAVKMLKEKADSSEREALMSELKMMTQLGSHENIVNLLGACTLSGPIYLIFEYCCYGDLLNYLRSKREKFHRTWTEIFKEHNFSFYPTFQSHPNSSMPGSREVQIHPDSDQISGLHGNSFHSEDEIEYENQKRLEEEEDLNVLTFEDLLCFAYQVAKGMEFLEFKSCVHRDLAARNVLVTHGKVVKICDFGLARDIMSDSNYVVRGNARLPVKWMAPESLFEGIYTIKSDVWSYGILLWEIFSLGVNPYPGIPVDANFYKLIQNGFKMDQPFYATEEIYIIMQSCWAFDSRKRPSFPNLTSFLGCQLADAEEAMYQNVDGRVSECPHTYQNRRPFSREMDLGLLSPQAQVEDS

SEQ ID NO: 3216 - protein, 618 aa, Homo sapiens
MVSPRMSGLLSQTVILALIFLPQTRPAGVFELQIHSFGPGPGPGAPRSPCSARLPCRLFFRVCLKPGLSEEAAESPCALGAALSARGPVYTEQPGAPAPDLPLPDGLLQVPFRDAWPGTFSFIIETWREELGDQIGGPAWSLLARVAGRRRLAAGGPWARDIQRAGAWELRFSYRARCEPPAVGTACTRLCRPRSAPSRCGPGLRPCAPLEDECEAPLVCRAGCSPEHGFCEQPGECRCLEGWTGPLCTVPVSTSSCLSPRGPSSATTGCLVPGPGPCDGNPCANGGSCSETPRSFECTCPRGFYGLRCEVSGVTCADGPCFNGGLCVGGADPDSAYICHCPPGFQGSNCEKRVDRCSLQPCRNGGLCLDLGHALRCRCRAGFAGPRCEHDLDDCAGRACANGGTCVEGGGAHRCSCALGFGGRDCRERADPCAARPCAHGGRCYAHFSGLVCACAPGYMGARCEFPVHPDGASALPAAPPGLRPGDPQRYLLPPALGLLVAAGVAGAALLLVHVRRRGHSQDAGSRLLAGTPEPSVHALPDALNNLRTQEGSGDGPSSSVDWNRPEDVDPQGIYVISAPSIYAREVATPLFPPLHTGRAGQRQHLLFPYPSSILSVK

SEQ ID NO: 3217 - protein, 446 aa, Homo sapiens
RSPCSARLPCRLFFRVCLKPGLSEEAAESPCALGAALSARGPVYTEQPGAPAPDLPLPDGLLQVPFRDAWPGTFSFIIETWREELGDQIGGPAWSLLARVAGRRRLAAGGPWARDIQRAGAWELRFSYRARCEPPAVGTACTRLCRPRSAPSRCGPGLRPCAPLEDECEAPLVCRAGCSPEHGFCEQPGECRCLEGWTGPLCTVPVSTSSCLSPRGPSSATTGCLVPGPGPCDGNPCANGGSCSETPRSFECTCPRGFYGLRCEVSGVTCADGPCFNGGLCVGGADPDSAYICHCPPGFQGSNCEKRVDRCSLQPCRNGGLCLDLGHALRCRCRAGFAGPRCEHDLDDCAGRACANGGTCVEGGGAHRCSCALGFGGRDCRERADPCAARPCAHGGRCYAHFSGLVCACAPGYMGARCEFPVHPDGASALPAAPPGLRPGDPQRYL

SEQ ID NO: 3218 - protein, 507 aa, synthetic construct
  REGION 1..507: note = Description of Artificial Sequence: Synthetic polypeptide
EVQLVESGGGLVQPGRSLTLSCAASTNIFSISPMGWYRQAPGKQRELVAAIHGFSTLYADSVKGRFTISRDNAKNSIYLQMNSLRPEDTALYYCNKVPWGDYHPRNVYWGQGTQVTVSSGGGGSGGGSEVQLVESGGGLVQPGNSLRLSCAASGFTFSKFGMSWVRQAPGKGLEWVSSISGSGRDTLYADSVKGRFTISRDNAKTTLYLQMNSLRPEDTAVYYCTIGGSLSVSSQGTLVTVSSGGGGSGGGSEVQLVESGGGLVQPGGSLKLSCAASGFTFNKYAINWVRQAPGKGLEWVARIRSKYNNYATYYADQVKDRFTISRDDSKNTAYLQMNNLKTEDTAVYYCVRHANFGNSYISYWAYWGQGTLVTVSSGGGGSGGGGSGGGGSQTVVTQEPSLTVSPGGTVTLTCASSTGAVTSGNYPNWVQQKPGQAPRGLIGGTKFLVPGTPARFSGSLLGGKAALTLSGVQPEDEAEYYCTLWYSNRWVFGGGTKLTVLHHHHHH

SEQ ID NO: 3219 - protein, 507 aa, synthetic construct
  REGION 1..507: note = Description of Artificial Sequence: Synthetic polypeptide
EVQLVESGGGLVQPGRSLTLSCAASTDIFSISPMGWYRQAPGKQRELVAAIHGGSTLYADSVKGRFTISRDNAKNSIYLQMNSLRPEDTALYYCNKVPWGDYHPRNVAWGQGTQVTVSSGGGGSGGGSEVQLVESGGGLVQPGNSLRLSCAASGFTFSKFGMSWVRQAPGKGLEWVSSISGSGRDTLYADSVKGRFTISRDNAKTTLYLQMNSLRPEDTAVYYCTIGGSLSVSSQGTLVTVSSGGGGSGGGSEVQLVESGGGLVQPGGSLKLSCAASGFTFNKYAINWVRQAPGKGLEWVARIRSKYNNYATYYADQVKDRFTISRDDSKNTAYLQMNNLKTEDTAVYYCVRHANFGNSYISYWAYWGQGTLVTVSSGGGGSGGGGSGGGGSQTVVTQEPSLTVSPGGTVTLTCASSTGAVTSGNYPNWVQQKPGQAPRGLIGGTKFLVPGTPARFSGSLLGGKAALTLSGVQPEDEAEYYCTLWYSNRWVFGGGTKLTVLHHHHHH

SEQ ID NO: 3220 - protein, 507 aa, synthetic construct
  REGION 1..507: note = Description of Artificial Sequence: Synthetic polypeptide
EVQLVESGGGLVQPGRSLTLSCAASTNDFSISPMGWYRQAPGKQRELVAAIHGGSTLYADSVKGRFTISRDNAKNSIYLQMNSLRPEDTALYYCNKVPWGDYHPRNVAWGQGTQVTVSSGGGGSGGGSEVQLVESGGGLVQPGNSLRLSCAASGFTFSKFGMSWVRQAPGKGLEWVSSISGSGRDTLYADSVKGRFTISRDNAKTTLYLQMNSLRPEDTAVYYCTIGGSLSVSSQGTLVTVSSGGGGSGGGSEVQLVESGGGLVQPGGSLKLSCAASGFTFNKYAINWVRQAPGKGLEWVARIRSKYNNYATYYADQVKDRFTISRDDSKNTAYLQMNNLKTEDTAVYYCVRHANFGNSYISYWAYWGQGTLVTVSSGGGGSGGGGSGGGGSQTVVTQEPSLTVSPGGTVTLTCASSTGAVTSGNYPNWVQQKPGQAPRGLIGGTKFLVPGTPARFSGSLLGGKAALTLSGVQPEDEAEYYCTLWYSNRWVFGGGTKLTVLHHHHHH

SEQ ID NO: 3221 - protein, 507 aa, synthetic construct
  REGION 1..507: note = Description of Artificial Sequence: Synthetic polypeptide
EVQLVESGGGLVQPGRSLTLSCAASTNIFSKSPMGWYRQAPGKQRELVAAIHGKSTLYADSVKGRFTISRDNAKNSIYLQMNSLRPEDTALYYCNKVPWGDYHPRNVVWGQGTQVTVSSGGGGSGGGSEVQLVESGGGLVQPGNSLRLSCAASGFTFSKFGMSWVRQAPGKGLEWVSSISGSGRDTLYADSVKGRFTISRDNAKTTLYLQMNSLRPEDTAVYYCTIGGSLSVSSQGTLVTVSSGGGGSGGGSEVQLVESGGGLVQPGGSLKLSCAASGFTFNKYAINWVRQAPGKGLEWVARIRSKYNNYATYYADQVKDRFTISRDDSKNTAYLQMNNLKTEDTAVYYCVRHANFGNSYISYWAYWGQGTLVTVSSGGGGSGGGGSGGGGSQTVVTQEPSLTVSPGGTVTLTCASSTGAVTSGNYPNWVQQKPGQAPRGLIGGTKFLVPGTPARFSGSLLGGKAALTLSGVQPEDEAEYYCTLWYSNRWVFGGGTKLTVLHHHHHH

SEQ ID NO: 3222 - protein, 507 aa, synthetic construct
  REGION 1..507: note = Description of Artificial Sequence: Synthetic polypeptide
EVQLVESGGGLVQPGRSLTLSCAASTNDFSISPMGWYRQAPGKQRELVAAIHGKSTLYADSVKGRFTISRDNAKNSIYLQMNSLRPEDTALYYCNKVPWGDYHPRNVKWGQGTQVTVSSGGGGSGGGSEVQLVESGGGLVQPGNSLRLSCAASGFTFSKFGMSWVRQAPGKGLEWVSSISGSGRDTLYADSVKGRFTISRDNAKTTLYLQMNSLRPEDTAVYYCTIGGSLSVSSQGTLVTVSSGGGGSGGGSEVQLVESGGGLVQPGGSLKLSCAASGFTFNKYAINWVRQAPGKGLEWVARIRSKYNNYATYYADQVKDRFTISRDDSKNTAYLQMNNLKTEDTAVYYCVRHANFGNSYISYWAYWGQGTLVTVSSGGGGSGGGGSGGGGSQTVVTQEPSLTVSPGGTVTLTCASSTGAVTSGNYPNWVQQKPGQAPRGLIGGTKFLVPGTPARFSGSLLGGKAALTLSGVQPEDEAEYYCTLWYSNRWVFGGGTKLTVLHHHHHH

SEQ ID NO: 3223 - protein, 507 aa, synthetic construct
  REGION 1..507: note = Description of Artificial Sequence: Synthetic polypeptide
EVQLVESGGGLVQPGRSLTLSCAASTNQFSISPMGWYRQAPGKQRELVAAIHGKSTLYADSVKGRFTISRDNAKNSIYLQMNSLRPEDTALYYCNKVPWGDYHPRNVVWGQGTQVTVSSGGGGSGGGSEVQLVESGGGLVQPGNSLRLSCAASGFTFSKFGMSWVRQAPGKGLEWVSSISGSGRDTLYADSVKGRFTISRDNAKTTLYLQMNSLRPEDTAVYYCTIGGSLSVSSQGTLVTVSSGGGGSGGGSEVQLVESGGGLVQPGGSLKLSCAASGFTFNKYAINWVRQAPGKGLEWVARIRSKYNNYATYYADQVKDRFTISRDDSKNTAYLQMNNLKTEDTAVYYCVRHANFGNSYISYWAYWGQGTLVTVSSGGGGSGGGGSGGGGSQTVVTQEPSLTVSPGGTVTLTCASSTGAVTSGNYPNWVQQKPGQAPRGLIGGTKFLVPGTPARFSGSLLGGKAALTLSGVQPEDEAEYYCTLWYSNRWVFGGGTKLTVLHHHHHH

SEQ ID NO: 3224 - protein, 507 aa, synthetic construct
  REGION 1..507: note = Description of Artificial Sequence: Synthetic polypeptide
EVQLVESGGGLVQPGRSLTLSCAASTNIFSSSPMGWYRQAPGKQRELVAAINGFSTLYADSVKGRFTISRDNAKNSIYLQMNSLRPEDTALYYCNKVPWGDYHPRNVHWGQGTQVTVSSGGGGSGGGSEVQLVESGGGLVQPGNSLRLSCAASGFTFSKFGMSWVRQAPGKGLEWVSSISGSGRDTLYADSVKGRFTISRDNAKTTLYLQMNSLRPEDTAVYYCTIGGSLSVSSQGTLVTVSSGGGGSGGGSEVQLVESGGGLVQPGGSLKLSCAASGFTFNKYAINWVRQAPGKGLEWVARIRSKYNNYATYYADQVKDRFTISRDDSKNTAYLQMNNLKTEDTAVYYCVRHANFGNSYISYWAYWGQGTLVTVSSGGGGSGGGGSGGGGSQTVVTQEPSLTVSPGGTVTLTCASSTGAVTSGNYPNWVQQKPGQAPRGLIGGTKFLVPGTPARFSGSLLGGKAALTLSGVQPEDEAEYYCTLWYSNRWVFGGGTKLTVLHHHHHH

SEQ ID NO: 3225 - protein, 507 aa, synthetic construct
  REGION 1..507: note = Description of Artificial Sequence: Synthetic polypeptide
EVQLVESGGGLVQPGRSLTLSCAASTNIFSSSPMGWYRQAPGKQRELVAAIHGFSTLYADSVKGRFTISRDNAKNSIYLQMNSLRPEDTALYYCNKVPWGDYHPRNVYWGQGTQVTVSSGGGGSGGGSEVQLVESGGGLVQPGNSLRLSCAASGFTFSKFGMSWVRQAPGKGLEWVSSISGSGRDTLYADSVKGRFTISRDNAKTTLYLQMNSLRPEDTAVYYCTIGGSLSVSSQGTLVTVSSGGGGSGGGSEVQLVESGGGLVQPGGSLKLSCAASGFTFNKYAINWVRQAPGKGLEWVARIRSKYNNYATYYADQVKDRFTISRDDSKNTAYLQMNNLKTEDTAVYYCVRHANFGNSYISYWAYWGQGTLVTVSSGGGGSGGGGSGGGGSQTVVTQEPSLTVSPGGTVTLTCASSTGAVTSGNYPNWVQQKPGQAPRGLIGGTKFLVPGTPARFSGSLLGGKAALTLSGVQPEDEAEYYCTLWYSNRWVFGGGTKLTVLHHHHHH

SEQ ID NO: 3226 - protein, 507 aa, synthetic construct
  REGION 1..507: note = Description of Artificial Sequence: Synthetic polypeptide
EVQLVESGGGLVQPGRSLTLSCAASTNIFSTSPMGWYRQAPGKQRELVAAIHGFQTLYADSVKGRFTISRDNAKNSIYLQMNSLRPEDTALYYCNKVPWGDYHPRNVVWGQGTQVTVSSGGGGSGGGSEVQLVESGGGLVQPGNSLRLSCAASGFTFSKFGMSWVRQAPGKGLEWVSSISGSGRDTLYADSVKGRFTISRDNAKTTLYLQMNSLRPEDTAVYYCTIGGSLSVSSQGTLVTVSSGGGGSGGGSEVQLVESGGGLVQPGGSLKLSCAASGFTFNKYAINWVRQAPGKGLEWVARIRSKYNNYATYYADQVKDRFTISRDDSKNTAYLQMNNLKTEDTAVYYCVRHANFGNSYISYWAYWGQGTLVTVSSGGGGSGGGGSGGGGSQTVVTQEPSLTVSPGGTVTLTCASSTGAVTSGNYPNWVQQKPGQAPRGLIGGTKFLVPGTPARFSGSLLGGKAALTLSGVQPEDEAEYYCTLWYSNRWVFGGGTKLTVLHHHHHH

SEQ ID NO: 3227 - protein, 507 aa, synthetic construct
  REGION 1..507: note = Description of Artificial Sequence: Synthetic polypeptide
EVQLVESGGGLVQPGRSLTLSCAASTNIFSRSPMGWYRQAPGKQRELVAAIHGFETLYADSVKGRFTISRDNAKNSIYLQMNSLRPEDTALYYCNKVPWGDYHPRNVLWGQGTQVTVSSGGGGSGGGSEVQLVESGGGLVQPGNSLRLSCAASGFTFSKFGMSWVRQAPGKGLEWVSSISGSGRDTLYADSVKGRFTISRDNAKTTLYLQMNSLRPEDTAVYYCTIGGSLSVSSQGTLVTVSSGGGGSGGGSEVQLVESGGGLVQPGGSLKLSCAASGFTFNKYAINWVRQAPGKGLEWVARIRSKYNNYATYYADQVKDRFTISRDDSKNTAYLQMNNLKTEDTAVYYCVRHANFGNSYISYWAYWGQGTLVTVSSGGGGSGGGGSGGGGSQTVVTQEPSLTVSPGGTVTLTCASSTGAVTSGNYPNWVQQKPGQAPRGLIGGTKFLVPGTPARFSGSLLGGKAALTLSGVQPEDEAEYYCTLWYSNRWVFGGGTKLTVLHHHHHH

SEQ ID NO: 3228 - protein, 507 aa, synthetic construct
  REGION 1..507: note = Description of Artificial Sequence: Synthetic polypeptide
EVQLVESGGGLVQPGRSLTLSCAASTNIFSESPMGWYRQAPGKQRELVAAIHGFTTLYADSVKGRFTISRDNAKNSIYLQMNSLRPEDTALYYCNKVPWGDYHPRNVTWGQGTQVTVSSGGGGSGGGSEVQLVESGGGLVQPGNSLRLSCAASGFTFSKFGMSWVRQAPGKGLEWVSSISGSGRDTLYADSVKGRFTISRDNAKTTLYLQMNSLRPEDTAVYYCTIGGSLSVSSQGTLVTVSSGGGGSGGGSEVQLVESGGGLVQPGGSLKLSCAASGFTFNKYAINWVRQAPGKGLEWVARIRSKYNNYATYYADQVKDRFTISRDDSKNTAYLQMNNLKTEDTAVYYCVRHANFGNSYISYWAYWGQGTLVTVSSGGGGSGGGGSGGGGSQTVVTQEPSLTVSPGGTVTLTCASSTGAVTSGNYPNWVQQKPGQAPRGLIGGTKFLVPGTPARFSGSLLGGKAALTLSGVQPEDEAEYYCTLWYSNRWVFGGGTKLTVLHHHHHH

SEQ ID NO: 3229 - protein, 507 aa, synthetic construct
  REGION 1..507: note = Description of Artificial Sequence: Synthetic polypeptide
EVQLVESGGGLVQPGRSLTLSCAASTNIFSDSPMGWYRQAPGKQRELVAAIHGFSTLYADSVKGRFTISRDNAKNSIYLQMNSLRPEDTALYYCNKVPWGDYHPRNVAWGQGTQVTVSSGGGGSGGGSEVQLVESGGGLVQPGNSLRLSCAASGFTFSKFGMSWVRQAPGKGLEWVSSISGSGRDTLYADSVKGRFTISRDNAKTTLYLQMNSLRPEDTAVYYCTIGGSLSVSSQGTLVTVSSGGGGSGGGSEVQLVESGGGLVQPGGSLKLSCAASGFTFNKYAINWVRQAPGKGLEWVARIRSKYNNYATYYADQVKDRFTISRDDSKNTAYLQMNNLKTEDTAVYYCVRHANFGNSYISYWAYWGQGTLVTVSSGGGGSGGGGSGGGGSQTVVTQEPSLTVSPGGTVTLTCASSTGAVTSGNYPNWVQQKPGQAPRGLIGGTKFLVPGTPARFSGSLLGGKAALTLSGVQPEDEAEYYCTLWYSNRWVFGGGTKLTVLHHHHHH

SEQ ID NO: 3230 - protein, 507 aa, synthetic construct
  REGION 1..507: note = Description of Artificial Sequence: Synthetic polypeptide
EVQLVESGGGLVQPGRSLTLSCAASTNIFSNSPMGWYRQAPGKQRELVAAIHGGSTLYADSVKGRFTISRDNAKNSIYLQMNSLRPEDTALYYCNKVPWGDYHPRNVHWGQGTQVTVSSGGGGSGGGSEVQLVESGGGLVQPGNSLRLSCAASGFTFSKFGMSWVRQAPGKGLEWVSSISGSGRDTLYADSVKGRFTISRDNAKTTLYLQMNSLRPEDTAVYYCTIGGSLSVSSQGTLVTVSSGGGGSGGGSEVQLVESGGGLVQPGGSLKLSCAASGFTFNKYAINWVRQAPGKGLEWVARIRSKYNNYATYYADQVKDRFTISRDDSKNTAYLQMNNLKTEDTAVYYCVRHANFGNSYISYWAYWGQGTLVTVSSGGGGSGGGGSGGGGSQTVVTQEPSLTVSPGGTVTLTCASSTGAVTSGNYPNWVQQKPGQAPRGLIGGTKFLVPGTPARFSGSLLGGKAALTLSGVQPEDEAEYYCTLWYSNRWVFGGGTKLTVLHHHHHH

SEQ ID NO: 3231 - protein, 507 aa, synthetic construct
  REGION 1..507: note = Description of Artificial Sequence: Synthetic polypeptide
EVQLVESGGGLVQPGRSLTLSCAASTNIFSNSPMGWYRQAPGKQRELVAAIHGRSTLYADSVKGRFTISRDNAKNSIYLQMNSLRPEDTALYYCNKVPWGDYHPRNVMWGQGTQVTVSSGGGGSGGGSEVQLVESGGGLVQPGNSLRLSCAASGFTFSKFGMSWVRQAPGKGLEWVSSISGSGRDTLYADSVKGRFTISRDNAKTTLYLQMNSLRPEDTAVYYCTIGGSLSVSSQGTLVTVSSGGGGSGGGSEVQLVESGGGLVQPGGSLKLSCAASGFTFNKYAINWVRQAPGKGLEWVARIRSKYNNYATYYADQVKDRFTISRDDSKNTAYLQMNNLKTEDTAVYYCVRHANFGNSYISYWAYWGQGTLVTVSSGGGGSGGGGSGGGGSQTVVTQEPSLTVSPGGTVTLTCASSTGAVTSGNYPNWVQQKPGQAPRGLIGGTKFLVPGTPARFSGSLLGGKAALTLSGVQPEDEAEYYCTLWYSNRWVFGGGTKLTVLHHHHHH

SEQ ID NO: 3232 - protein, 507 aa, synthetic construct
  REGION 1..507: note = Description of Artificial Sequence: Synthetic polypeptide
EVQLVESGGGLVQPGRSLTLSCAASTNIFSNSPMGWYRQAPGKQRELVAAIHGPSTLYADSVKGRFTISRDNAKNSIYLQMNSLRPEDTALYYCNKVPWGDYHPRNVTWGQGTQVTVSSGGGGSGGGSEVQLVESGGGLVQPGNSLRLSCAASGFTFSKFGMSWVRQAPGKGLEWVSSISGSGRDTLYADSVKGRFTISRDNAKTTLYLQMNSLRPEDTAVYYCTIGGSLSVSSQGTLVTVSSGGGGSGGGSEVQLVESGGGLVQPGGSLKLSCAASGFTFNKYAINWVRQAPGKGLEWVARIRSKYNNYATYYADQVKDRFTISRDDSKNTAYLQMNNLKTEDTAVYYCVRHANFGNSYISYWAYWGQGTLVTVSSGGGGSGGGGSGGGGSQTVVTQEPSLTVSPGGTVTLTCASSTGAVTSGNYPNWVQQKPGQAPRGLIGGTKFLVPGTPARFSGSLLGGKAALTLSGVQPEDEAEYYCTLWYSNRWVFGGGTKLTVLHHHHHH

SEQ ID NO: 3233 - protein, 507 aa, synthetic construct
  REGION 1..507: note = Description of Artificial Sequence: Synthetic polypeptide
EVQLVESGGGLVQPGRSLTLSCAASTNIFSNSPMGWYRQAPGKQRELVAAIHGDSTLYADSVKGRFTISRDNAKNSIYLQMNSLRPEDTALYYCNKVPWGDYHPRNVRWGQGTQVTVSSGGGGSGGGSEVQLVESGGGLVQPGNSLRLSCAASGFTFSKFGMSWVRQAPGKGLEWVSSISGSGRDTLYADSVKGRFTISRDNAKTTLYLQMNSLRPEDTAVYYCTIGGSLSVSSQGTLVTVSSGGGGSGGGSEVQLVESGGGLVQPGGSLKLSCAASGFTFNKYAINWVRQAPGKGLEWVARIRSKYNNYATYYADQVKDRFTISRDDSKNTAYLQMNNLKTEDTAVYYCVRHANFGNSYISYWAYWGQGTLVTVSSGGGGSGGGGSGGGGSQTVVTQEPSLTVSPGGTVTLTCASSTGAVTSGNYPNWVQQKPGQAPRGLIGGTKFLVPGTPARFSGSLLGGKAALTLSGVQPEDEAEYYCTLWYSNRWVFGGGTKLTVLHHHHHH

SEQ ID NO: 3234 - protein, 507 aa, synthetic construct
  REGION 1..507: note = Description of Artificial Sequence: Synthetic polypeptide
EVQLVESGGGLVQPGRSLTLSCAASTNIFSRSPMGWYRQAPGKQRELVAAIHGDSTLYADSVKGRFTISRDNAKNSIYLQMNSLRPEDTALYYCNKVPWGDYHPRNVTWGQGTQVTVSSGGGGSGGGSEVQLVESGGGLVQPGNSLRLSCAASGFTFSKFGMSWVRQAPGKGLEWVSSISGSGRDTLYADSVKGRFTISRDNAKTTLYLQMNSLRPEDTAVYYCTIGGSLSVSSQGTLVTVSSGGGGSGGGSEVQLVESGGGLVQPGGSLKLSCAASGFTFNKYAINWVRQAPGKGLEWVARIRSKYNNYATYYADQVKDRFTISRDDSKNTAYLQMNNLKTEDTAVYYCVRHANFGNSYISYWAYWGQGTLVTVSSGGGGSGGGGSGGGGSQTVVTQEPSLTVSPGGTVTLTCASSTGAVTSGNYPNWVQQKPGQAPRGLIGGTKFLVPGTPARFSGSLLGGKAALTLSGVQPEDEAEYYCTLWYSNRWVFGGGTKLTVLHHHHHH

SEQ ID NO: 3235 - protein, 507 aa, synthetic construct
  REGION 1..507: note = Description of Artificial Sequence: Synthetic polypeptide
EVQLVESGGGLVQPGRSLTLSCAASTNIFSKSPMGWYRQAPGKQRELVAAIHGQSTLYADSVKGRFTISRDNAKNSIYLQMNSLRPEDTALYYCNKVPWGDYHPRNVTWGQGTQVTVSSGGGGSGGGSEVQLVESGGGLVQPGNSLRLSCAASGFTFSKFGMSWVRQAPGKGLEWVSSISGSGRDTLYADSVKGRFTISRDNAKTTLYLQMNSLRPEDTAVYYCTIGGSLSVSSQGTLVTVSSGGGGSGGGSEVQLVESGGGLVQPGGSLKLSCAASGFTFNKYAINWVRQAPGKGLEWVARIRSKYNNYATYYADQVKDRFTISRDDSKNTAYLQMNNLKTEDTAVYYCVRHANFGNSYISYWAYWGQGTLVTVSSGGGGSGGGGSGGGGSQTVVTQEPSLTVSPGGTVTLTCASSTGAVTSGNYPNWVQQKPGQAPRGLIGGTKFLVPGTPARFSGSLLGGKAALTLSGVQPEDEAEYYCTLWYSNRWVFGGGTKLTVLHHHHHH

SEQ ID NO: 3236 - protein, 507 aa, synthetic construct
  REGION 1..507: note = Description of Artificial Sequence: Synthetic polypeptide
EVQLVESGGGLVQPGRSLTLSCAASTNIFSSSPMGWYRQAPGKQRELVAAIHGHSTLYADSVKGRFTISRDNAKNSIYLQMNSLRPEDTALYYCNKVPWGDYHPRNVTWGQGTQVTVSSGGGGSGGGSEVQLVESGGGLVQPGNSLRLSCAASGFTFSKFGMSWVRQAPGKGLEWVSSISGSGRDTLYADSVKGRFTISRDNAKTTLYLQMNSLRPEDTAVYYCTIGGSLSVSSQGTLVTVSSGGGGSGGGSEVQLVESGGGLVQPGGSLKLSCAASGFTFNKYAINWVRQAPGKGLEWVARIRSKYNNYATYYADQVKDRFTISRDDSKNTAYLQMNNLKTEDTAVYYCVRHANFGNSYISYWAYWGQGTLVTVSSGGGGSGGGGSGGGGSQTVVTQEPSLTVSPGGTVTLTCASSTGAVTSGNYPNWVQQKPGQAPRGLIGGTKFLVPGTPARFSGSLLGGKAALTLSGVQPEDEAEYYCTLWYSNRWVFGGGTKLTVLHHHHHH

SEQ ID NO: 3237 - protein, 507 aa, synthetic construct
  REGION 1..507: note = Description of Artificial Sequence: Synthetic polypeptide
EVQLVESGGGLVQPGRSLTLSCAASTNIFSSSPMGWYRQAPGKQRELVAAIHGESTLYADSVKGRFTISRDNAKNSIYLQMNSLRPEDTALYYCNKVPWGDYHPRKVYWGQGTQVTVSSGGGGSGGGSEVQLVESGGGLVQPGNSLRLSCAASGFTFSKFGMSWVRQAPGKGLEWVSSISGSGRDTLYADSVKGRFTISRDNAKTTLYLQMNSLRPEDTAVYYCTIGGSLSVSSQGTLVTVSSGGGGSGGGSEVQLVESGGGLVQPGGSLKLSCAASGFTFNKYAINWVRQAPGKGLEWVARIRSKYNNYATYYADQVKDRFTISRDDSKNTAYLQMNNLKTEDTAVYYCVRHANFGNSYISYWAYWGQGTLVTVSSGGGGSGGGGSGGGGSQTVVTQEPSLTVSPGGTVTLTCASSTGAVTSGNYPNWVQQKPGQAPRGLIGGTKFLVPGTPARFSGSLLGGKAALTLSGVQPEDEAEYYCTLWYSNRWVFGGGTKLTVLHHHHHH

SEQ ID NO: 3238 - protein, 507 aa, synthetic construct
  REGION 1..507: note = Description of Artificial Sequence: Synthetic polypeptide
EVQLVESGGGLVQPGRSLTLSCAASTNIFSRSPMGWYRQAPGKQRELVAAIHGNSTLYADSVKGRFTISRDNAKNSIYLQMNSLRPEDTALYYCNKVPWGIYHPRNVYWGQGTQVTVSSGGGGSGGGSEVQLVESGGGLVQPGNSLRLSCAASGFTFSKFGMSWVRQAPGKGLEWVSSISGSGRDTLYADSVKGRFTISRDNAKTTLYLQMNSLRPEDTAVYYCTIGGSLSVSSQGTLVTVSSGGGGSGGGSEVQLVESGGGLVQPGGSLKLSCAASGFTFNKYAINWVRQAPGKGLEWVARIRSKYNNYATYYADQVKDRFTISRDDSKNTAYLQMNNLKTEDTAVYYCVRHANFGNSYISYWAYWGQGTLVTVSSGGGGSGGGGSGGGGSQTVVTQEPSLTVSPGGTVTLTCASSTGAVTSGNYPNWVQQKPGQAPRGLIGGTKFLVPGTPARFSGSLLGGKAALTLSGVQPEDEAEYYCTLWYSNRWVFGGGTKLTVLHHHHHH

SEQ ID NO: 3239 - protein, 507 aa, synthetic construct
  REGION 1..507: note = Description of Artificial Sequence: Synthetic polypeptide
EVQLVESGGGLVQPGRSLTLSCAASTNIFSESPMGWYRQAPGKQRELVAAIHGNSTLYADSVKGRFTISRDNAKNSIYLQMNSLRPEDTALYYCNKVPWGTYHPRNVYWGQGTQVTVSSGGGGSGGGSEVQLVESGGGLVQPGNSLRLSCAASGFTFSKFGMSWVRQAPGKGLEWVSSISGSGRDTLYADSVKGRFTISRDNAKTTLYLQMNSLRPEDTAVYYCTIGGSLSVSSQGTLVTVSSGGGGSGGGSEVQLVESGGGLVQPGGSLKLSCAASGFTFNKYAINWVRQAPGKGLEWVARIRSKYNNYATYYADQVKDRFTISRDDSKNTAYLQMNNLKTEDTAVYYCVRHANFGNSYISYWAYWGQGTLVTVSSGGGGSGGGGSGGGGSQTVVTQEPSLTVSPGGTVTLTCASSTGAVTSGNYPNWVQQKPGQAPRGLIGGTKFLVPGTPARFSGSLLGGKAALTLSGVQPEDEAEYYCTLWYSNRWVFGGGTKLTVLHHHHHH

SEQ ID NO: 3240 - protein, 507 aa, synthetic construct
  REGION 1..507: note = Description of Artificial Sequence: Synthetic polypeptide
EVQLVESGGGLVQPGRSLTLSCAASTNIFSVSPMGWYRQAPGKQRELVAAIHGNSTLYADSVKGRFTISRDNAKNSIYLQMNSLRPEDTALYYCNKVPWGKYHPRNVYWGQGTQVTVSSGGGGSGGGSEVQLVESGGGLVQPGNSLRLSCAASGFTFSKFGMSWVRQAPGKGLEWVSSISGSGRDTLYADSVKGRFTISRDNAKTTLYLQMNSLRPEDTAVYYCTIGGSLSVSSQGTLVTVSSGGGGSGGGSEVQLVESGGGLVQPGGSLKLSCAASGFTFNKYAINWVRQAPGKGLEWVARIRSKYNNYATYYADQVKDRFTISRDDSKNTAYLQMNNLKTEDTAVYYCVRHANFGNSYISYWAYWGQGTLVTVSSGGGGSGGGGSGGGGSQTVVTQEPSLTVSPGGTVTLTCASSTGAVTSGNYPNWVQQKPGQAPRGLIGGTKFLVPGTPARFSGSLLGGKAALTLSGVQPEDEAEYYCTLWYSNRWVFGGGTKLTVLHHHHHH

SEQ ID NO: 3241 - protein, 507 aa, synthetic construct
  REGION 1..507: note = Description of Artificial Sequence: Synthetic polypeptide
EVQLVESGGGLVQPGRSLTLSCAASTNIFSVSPMGWYRQAPGKQRELVAAIHGNSTLYADSVKGRFTISRDNAKNSIYLQMNSLRPEDTALYYCNKVPWGDYHPRNVYWGQGTQVTVSSGGGGSGGGSEVQLVESGGGLVQPGNSLRLSCAASGFTFSKFGMSWVRQAPGKGLEWVSSISGSGRDTLYADSVKGRFTISRDNAKTTLYLQMNSLRPEDTAVYYCTIGGSLSVSSQGTLVTVSSGGGGSGGGSEVQLVESGGGLVQPGGSLKLSCAASGFTFNKYAINWVRQAPGKGLEWVARIRSKYNNYATYYADQVKDRFTISRDDSKNTAYLQMNNLKTEDTAVYYCVRHANFGNSYISYWAYWGQGTLVTVSSGGGGSGGGGSGGGGSQTVVTQEPSLTVSPGGTVTLTCASSTGAVTSGNYPNWVQQKPGQAPRGLIGGTKFLVPGTPARFSGSLLGGKAALTLSGVQPEDEAEYYCTLWYSNRWVFGGGTKLTVLHHHHHH

SEQ ID NO: 3242 - protein, 507 aa, synthetic construct
  REGION 1..507: note = Description of Artificial Sequence: Synthetic polypeptide
EVQLVESGGGLVQPGRSLTLSCAASTNIFSKSPMGWYRQAPGKQRELVAAIHGNSTLYADSVKGRFTISRDNAKNSIYLQMNSLRPEDTALYYCNKVPWGDYHPREVYWGQGTQVTVSSGGGGSGGGSEVQLVESGGGLVQPGNSLRLSCAASGFTFSKFGMSWVRQAPGKGLEWVSSISGSGRDTLYADSVKGRFTISRDNAKTTLYLQMNSLRPEDTAVYYCTIGGSLSVSSQGTLVTVSSGGGGSGGGSEVQLVESGGGLVQPGGSLKLSCAASGFTFNKYAINWVRQAPGKGLEWVARIRSKYNNYATYYADQVKDRFTISRDDSKNTAYLQMNNLKTEDTAVYYCVRHANFGNSYISYWAYWGQGTLVTVSSGGGGSGGGGSGGGGSQTVVTQEPSLTVSPGGTVTLTCASSTGAVTSGNYPNWVQQKPGQAPRGLIGGTKFLVPGTPARFSGSLLGGKAALTLSGVQPEDEAEYYCTLWYSNRWVFGGGTKLTVLHHHHHH

SEQ ID NO: 3243 - protein, 507 aa, synthetic construct
  REGION 1..507: note = Description of Artificial Sequence: Synthetic polypeptide
EVQLVESGGGLVQPGRSLTLSCAASTNIFSDSPMGWYRQAPGKQRELVAAIHGTSTLYADSVKGRFTISRDNAKNSIYLQMNSLRPEDTALYYCNKVPWGDYHPRNVYWGQGTQVTVSSGGGGSGGGSEVQLVESGGGLVQPGNSLRLSCAASGFTFSKFGMSWVRQAPGKGLEWVSSISGSGRDTLYADSVKGRFTISRDNAKTTLYLQMNSLRPEDTAVYYCTIGGSLSVSSQGTLVTVSSGGGGSGGGSEVQLVESGGGLVQPGGSLKLSCAASGFTFNKYAINWVRQAPGKGLEWVARIRSKYNNYATYYADQVKDRFTISRDDSKNTAYLQMNNLKTEDTAVYYCVRHANFGNSYISYWAYWGQGTLVTVSSGGGGSGGGGSGGGGSQTVVTQEPSLTVSPGGTVTLTCASSTGAVTSGNYPNWVQQKPGQAPRGLIGGTKFLVPGTPARFSGSLLGGKAALTLSGVQPEDEAEYYCTLWYSNRWVFGGGTKLTVLHHHHHH

SEQ ID NO: 3244 - protein, 507 aa, synthetic construct
  REGION 1..507: note = Description of Artificial Sequence: Synthetic polypeptide
EVQLVESGGGLVQPGRSLTLSCAASTNIFSRSPMGWYRQAPGKQRELVAAIHGTSTLYADSVKGRFTISRDNAKNSIYLQMNSLRPEDTALYYCNKVPWGKYHPRNVYWGQGTQVTVSSGGGGSGGGSEVQLVESGGGLVQPGNSLRLSCAASGFTFSKFGMSWVRQAPGKGLEWVSSISGSGRDTLYADSVKGRFTISRDNAKTTLYLQMNSLRPEDTAVYYCTIGGSLSVSSQGTLVTVSSGGGGSGGGSEVQLVESGGGLVQPGGSLKLSCAASGFTFNKYAINWVRQAPGKGLEWVARIRSKYNNYATYYADQVKDRFTISRDDSKNTAYLQMNNLKTEDTAVYYCVRHANFGNSYISYWAYWGQGTLVTVSSGGGGSGGGGSGGGGSQTVVTQEPSLTVSPGGTVTLTCASSTGAVTSGNYPNWVQQKPGQAPRGLIGGTKFLVPGTPARFSGSLLGGKAALTLSGVQPEDEAEYYCTLWYSNRWVFGGGTKLTVLHHHHHH

SEQ ID NO: 3245 - protein, 507 aa, synthetic construct
  REGION 1..507: note = Description of Artificial Sequence: Synthetic polypeptide
EVQLVESGGGLVQPGRSLTLSCAASTNIFSHSPMGWYRQAPGKQRELVAAIHGTSTLYADSVKGRFTISRDNAKNSIYLQMNSLRPEDTALYYCNKVPWGRYHPRNVYWGQGTQVTVSSGGGGSGGGSEVQLVESGGGLVQPGNSLRLSCAASGFTFSKFGMSWVRQAPGKGLEWVSSISGSGRDTLYADSVKGRFTISRDNAKTTLYLQMNSLRPEDTAVYYCTIGGSLSVSSQGTLVTVSSGGGGSGGGSEVQLVESGGGLVQPGGSLKLSCAASGFTFNKYAINWVRQAPGKGLEWVARIRSKYNNYATYYADQVKDRFTISRDDSKNTAYLQMNNLKTEDTAVYYCVRHANFGNSYISYWAYWGQGTLVTVSSGGGGSGGGGSGGGGSQTVVTQEPSLTVSPGGTVTLTCASSTGAVTSGNYPNWVQQKPGQAPRGLIGGTKFLVPGTPARFSGSLLGGKAALTLSGVQPEDEAEYYCTLWYSNRWVFGGGTKLTVLHHHHHH

SEQ ID NO: 3246 - protein, 507 aa, synthetic construct
  REGION 1..507: note = Description of Artificial Sequence: Synthetic polypeptide
EVQLVESGGGLVQPGRSLTLSCAASTNIFSTSPMGWYRQAPGKQRELVAAIHGTSTLYADSVKGRFTISRDNAKNSIYLQMNSLRPEDTALYYCNKVPWGDYHPGNVYWGQGTQVTVSSGGGGSGGGSEVQLVESGGGLVQPGNSLRLSCAASGFTFSKFGMSWVRQAPGKGLEWVSSISGSGRDTLYADSVKGRFTISRDNAKTTLYLQMNSLRPEDTAVYYCTIGGSLSVSSQGTLVTVSSGGGGSGGGSEVQLVESGGGLVQPGGSLKLSCAASGFTFNKYAINWVRQAPGKGLEWVARIRSKYNNYATYYADQVKDRFTISRDDSKNTAYLQMNNLKTEDTAVYYCVRHANFGNSYISYWAYWGQGTLVTVSSGGGGSGGGGSGGGGSQTVVTQEPSLTVSPGGTVTLTCASSTGAVTSGNYPNWVQQKPGQAPRGLIGGTKFLVPGTPARFSGSLLGGKAALTLSGVQPEDEAEYYCTLWYSNRWVFGGGTKLTVLHHHHHH

SEQ ID NO: 3247 - protein, 507 aa, synthetic construct
  REGION 1..507: note = Description of Artificial Sequence: Synthetic polypeptide
EVQLVESGGGLVQPGRSLTLSCAASTNIFSTSPMGWYRQAPGKQRELVAAIHGTSTLYADSVKGRFTISRDNAKNSIYLQMNSLRPEDTALYYCNKVPWGDYHPRNVQWGQGTQVTVSSGGGGSGGGSEVQLVESGGGLVQPGNSLRLSCAASGFTFSKFGMSWVRQAPGKGLEWVSSISGSGRDTLYADSVKGRFTISRDNAKTTLYLQMNSLRPEDTAVYYCTIGGSLSVSSQGTLVTVSSGGGGSGGGSEVQLVESGGGLVQPGGSLKLSCAASGFTFNKYAINWVRQAPGKGLEWVARIRSKYNNYATYYADQVKDRFTISRDDSKNTAYLQMNNLKTEDTAVYYCVRHANFGNSYISYWAYWGQGTLVTVSSGGGGSGGGGSGGGGSQTVVTQEPSLTVSPGGTVTLTCASSTGAVTSGNYPNWVQQKPGQAPRGLIGGTKFLVPGTPARFSGSLLGGKAALTLSGVQPEDEAEYYCTLWYSNRWVFGGGTKLTVLHHHHHH

SEQ ID NO: 3248 - protein, 507 aa, synthetic construct
  REGION 1..507: note = Description of Artificial Sequence: Synthetic polypeptide
EVQLVESGGGLVQPGRSLTLSCAASTNIFSLSPMGWYRQAPGKQRELVAAIHGDSTLYADSVKGRFTISRDNAKNSIYLQMNSLRPEDTALYYCNKVPWGDYHPRNVYWGQGTQVTVSSGGGGSGGGSEVQLVESGGGLVQPGNSLRLSCAASGFTFSKFGMSWVRQAPGKGLEWVSSISGSGRDTLYADSVKGRFTISRDNAKTTLYLQMNSLRPEDTAVYYCTIGGSLSVSSQGTLVTVSSGGGGSGGGSEVQLVESGGGLVQPGGSLKLSCAASGFTFNKYAINWVRQAPGKGLEWVARIRSKYNNYATYYADQVKDRFTISRDDSKNTAYLQMNNLKTEDTAVYYCVRHANFGNSYISYWAYWGQGTLVTVSSGGGGSGGGGSGGGGSQTVVTQEPSLTVSPGGTVTLTCASSTGAVTSGNYPNWVQQKPGQAPRGLIGGTKFLVPGTPARFSGSLLGGKAALTLSGVQPEDEAEYYCTLWYSNRWVFGGGTKLTVLHHHHHH

SEQ ID NO: 3249 - protein, 507 aa, synthetic construct
  REGION 1..507: note = Description of Artificial Sequence: Synthetic polypeptide
EVQLVESGGGLVQPGRSLTLSCAASTNIFSISPGGWYRQAPGKQRELVAAIHGSSTLYADSVKGRFTISRDNAKNSIYLQMNSLRPEDTALYYCNKVPWGDYHPRNVYWGQGTQVTVSSGGGGSGGGSEVQLVESGGGLVQPGNSLRLSCAASGFTFSKFGMSWVRQAPGKGLEWVSSISGSGRDTLYADSVKGRFTISRDNAKTTLYLQMNSLRPEDTAVYYCTIGGSLSVSSQGTLVTVSSGGGGSGGGSEVQLVESGGGLVQPGGSLKLSCAASGFTFNKYAINWVRQAPGKGLEWVARIRSKYNNYATYYADQVKDRFTISRDDSKNTAYLQMNNLKTEDTAVYYCVRHANFGNSYISYWAYWGQGTLVTVSSGGGGSGGGGSGGGGSQTVVTQEPSLTVSPGGTVTLTCASSTGAVTSGNYPNWVQQKPGQAPRGLIGGTKFLVPGTPARFSGSLLGGKAALTLSGVQPEDEAEYYCTLWYSNRWVFGGGTKLTVLHHHHHH

SEQ ID NO: 3250 - protein, 507 aa, synthetic construct
  REGION 1..507: note = Description of Artificial Sequence: Synthetic polypeptide
EVQLVESGGGLVQPGRSLTLSCAASTNHFSISPMGWYRQAPGKQRELVAAIHGSSTLYADSVKGRFTISRDNAKNSIYLQMNSLRPEDTALYYCNKVPWGDYHPRVVYWGQGTQVTVSSGGGGSGGGSEVQLVESGGGLVQPGNSLRLSCAASGFTFSKFGMSWVRQAPGKGLEWVSSISGSGRDTLYADSVKGRFTISRDNAKTTLYLQMNSLRPEDTAVYYCTIGGSLSVSSQGTLVTVSSGGGGSGGGSEVQLVESGGGLVQPGGSLKLSCAASGFTFNKYAINWVRQAPGKGLEWVARIRSKYNNYATYYADQVKDRFTISRDDSKNTAYLQMNNLKTEDTAVYYCVRHANFGNSYISYWAYWGQGTLVTVSSGGGGSGGGGSGGGGSQTVVTQEPSLTVSPGGTVTLTCASSTGAVTSGNYPNWVQQKPGQAPRGLIGGTKFLVPGTPARFSGSLLGGKAALTLSGVQPEDEAEYYCTLWYSNRWVFGGGTKLTVLHHHHHH

SEQ ID NO: 3251 - protein, 507 aa, synthetic construct
  REGION 1..507: note = Description of Artificial Sequence: Synthetic polypeptide
EVQLVESGGGLVQPGRSLTLSCAASTNIFSASPMGWYRQAPGKQRELVAAIHGSSTLYADSVKGRFTISRDNAKNSIYLQMNSLRPEDTALYYCNKVPWGDYHPRNVNWGQGTQVTVSSGGGGSGGGSEVQLVESGGGLVQPGNSLRLSCAASGFTFSKFGMSWVRQAPGKGLEWVSSISGSGRDTLYADSVKGRFTISRDNAKTTLYLQMNSLRPEDTAVYYCTIGGSLSVSSQGTLVTVSSGGGGSGGGSEVQLVESGGGLVQPGGSLKLSCAASGFTFNKYAINWVRQAPGKGLEWVARIRSKYNNYATYYADQVKDRFTISRDDSKNTAYLQMNNLKTEDTAVYYCVRHANFGNSYISYWAYWGQGTLVTVSSGGGGSGGGGSGGGGSQTVVTQEPSLTVSPGGTVTLTCASSTGAVTSGNYPNWVQQKPGQAPRGLIGGTKFLVPGTPARFSGSLLGGKAALTLSGVQPEDEAEYYCTLWYSNRWVFGGGTKLTVLHHHHHH

SEQ ID NO: 3252 - protein, 507 aa, synthetic construct
  REGION 1..507: note = Description of Artificial Sequence: Synthetic polypeptide
EVQLVESGGGLVQPGRSLTLSCAASTNIFSASPMGWYRQAPGKQRELVAAIHGSSTLYADSVKGRFTISRDNAKNSIYLQMNSLRPEDTALYYCNKVPWGRYHPRNVYWGQGTQVTVSSGGGGSGGGSEVQLVESGGGLVQPGNSLRLSCAASGFTFSKFGMSWVRQAPGKGLEWVSSISGSGRDTLYADSVKGRFTISRDNAKTTLYLQMNSLRPEDTAVYYCTIGGSLSVSSQGTLVTVSSGGGGSGGGSEVQLVESGGGLVQPGGSLKLSCAASGFTFNKYAINWVRQAPGKGLEWVARIRSKYNNYATYYADQVKDRFTISRDDSKNTAYLQMNNLKTEDTAVYYCVRHANFGNSYISYWAYWGQGTLVTVSSGGGGSGGGGSGGGGSQTVVTQEPSLTVSPGGTVTLTCASSTGAVTSGNYPNWVQQKPGQAPRGLIGGTKFLVPGTPARFSGSLLGGKAALTLSGVQPEDEAEYYCTLWYSNRWVFGGGTKLTVLHHHHHH

SEQ ID NO: 3253 - protein, 507 aa, synthetic construct
  REGION 1..507: note = Description of Artificial Sequence: Synthetic polypeptide
EVQLVESGGGLVQPGRSLTLSCAASTNISSISPMGWYRQAPGKQRELVAAIHGTSTLYADSVKGRFTISRDNAKNSIYLQMNSLRPEDTALYYCNKVPWGDYHPGNVYWGQGTQVTVSSGGGGSGGGSEVQLVESGGGLVQPGNSLRLSCAASGFTFSKFGMSWVRQAPGKGLEWVSSISGSGRDTLYADSVKGRFTISRDNAKTTLYLQMNSLRPEDTAVYYCTIGGSLSVSSQGTLVTVSSGGGGSGGGSEVQLVESGGGLVQPGGSLKLSCAASGFTFNKYAINWVRQAPGKGLEWVARIRSKYNNYATYYADQVKDRFTISRDDSKNTAYLQMNNLKTEDTAVYYCVRHANFGNSYISYWAYWGQGTLVTVSSGGGGSGGGGSGGGGSQTVVTQEPSLTVSPGGTVTLTCASSTGAVTSGNYPNWVQQKPGQAPRGLIGGTKFLVPGTPARFSGSLLGGKAALTLSGVQPEDEAEYYCTLWYSNRWVFGGGTKLTVLHHHHHH

SEQ ID NO: 3254 - protein, 507 aa, synthetic construct
  REGION 1..507: note = Description of Artificial Sequence: Synthetic polypeptide
EVQLVESGGGLVQPGRSLTLSCAASTNIESISPMGWYRQAPGKQRELVAAIHGTSTLYADSVKGRFTISRDNAKNSIYLQMNSLRPEDTALYYCNKVPWGDYHPGNVYWGQGTQVTVSSGGGGSGGGSEVQLVESGGGLVQPGNSLRLSCAASGFTFSKFGMSWVRQAPGKGLEWVSSISGSGRDTLYADSVKGRFTISRDNAKTTLYLQMNSLRPEDTAVYYCTIGGSLSVSSQGTLVTVSSGGGGSGGGSEVQLVESGGGLVQPGGSLKLSCAASGFTFNKYAINWVRQAPGKGLEWVARIRSKYNNYATYYADQVKDRFTISRDDSKNTAYLQMNNLKTEDTAVYYCVRHANFGNSYISYWAYWGQGTLVTVSSGGGGSGGGGSGGGGSQTVVTQEPSLTVSPGGTVTLTCASSTGAVTSGNYPNWVQQKPGQAPRGLIGGTKFLVPGTPARFSGSLLGGKAALTLSGVQPEDEAEYYCTLWYSNRWVFGGGTKLTVLHHHHHH

SEQ ID NO: 3255 - protein, 507 aa, synthetic construct
  REGION 1..507: note = Description of Artificial Sequence: Synthetic polypeptide
EVQLVESGGGLVQPGRSLTLSCAASTNIFSISPYGWYRQAPGKQRELVAAIHGTSTLYADSVKGRFTISRDNAKNSIYLQMNSLRPEDTALYYCNKVPWGDYHPGNVYWGQGTQVTVSSGGGGSGGGSEVQLVESGGGLVQPGNSLRLSCAASGFTFSKFGMSWVRQAPGKGLEWVSSISGSGRDTLYADSVKGRFTISRDNAKTTLYLQMNSLRPEDTAVYYCTIGGSLSVSSQGTLVTVSSGGGGSGGGSEVQLVESGGGLVQPGGSLKLSCAASGFTFNKYAINWVRQAPGKGLEWVARIRSKYNNYATYYADQVKDRFTISRDDSKNTAYLQMNNLKTEDTAVYYCVRHANFGNSYISYWAYWGQGTLVTVSSGGGGSGGGGSGGGGSQTVVTQEPSLTVSPGGTVTLTCASSTGAVTSGNYPNWVQQKPGQAPRGLIGGTKFLVPGTPARFSGSLLGGKAALTLSGVQPEDEAEYYCTLWYSNRWVFGGGTKLTVLHHHHHH

SEQ ID NO: 3256 - protein, 507 aa, synthetic construct
  REGION 1..507: note = Description of Artificial Sequence: Synthetic polypeptide
EVQLVESGGGLVQPGRSLTLSCAASTNIASISPMGWYRQAPGKQRELVAAIHGTSTLYADSVKGRFTISRDNAKNSIYLQMNSLRPEDTALYYCNKVPWGDYHPGNVYWGQGTQVTVSSGGGGSGGGSEVQLVESGGGLVQPGNSLRLSCAASGFTFSKFGMSWVRQAPGKGLEWVSSISGSGRDTLYADSVKGRFTISRDNAKTTLYLQMNSLRPEDTAVYYCTIGGSLSVSSQGTLVTVSSGGGGSGGGSEVQLVESGGGLVQPGGSLKLSCAASGFTFNKYAINWVRQAPGKGLEWVARIRSKYNNYATYYADQVKDRFTISRDDSKNTAYLQMNNLKTEDTAVYYCVRHANFGNSYISYWAYWGQGTLVTVSSGGGGSGGGGSGGGGSQTVVTQEPSLTVSPGGTVTLTCASSTGAVTSGNYPNWVQQKPGQAPRGLIGGTKFLVPGTPARFSGSLLGGKAALTLSGVQPEDEAEYYCTLWYSNRWVFGGGTKLTVLHHHHHH

SEQ ID NO: 3257 - protein, 507 aa, synthetic construct
  REGION 1..507: note = Description of Artificial Sequence: Synthetic polypeptide
EVQLVESGGGLVQPGRSLTLSCAASTNIASISPMGWYRQAPGKQRELVAAIHGKSTLYADSVKGRFTISRDNAKNSIYLQMNSLRPEDTALYYCNKVPWGDYHPGNVYWGQGTQVTVSSGGGGSGGGSEVQLVESGGGLVQPGNSLRLSCAASGFTFSKFGMSWVRQAPGKGLEWVSSISGSGRDTLYADSVKGRFTISRDNAKTTLYLQMNSLRPEDTAVYYCTIGGSLSVSSQGTLVTVSSGGGGSGGGSEVQLVESGGGLVQPGGSLKLSCAASGFTFNKYAINWVRQAPGKGLEWVARIRSKYNNYATYYADQVKDRFTISRDDSKNTAYLQMNNLKTEDTAVYYCVRHANFGNSYISYWAYWGQGTLVTVSSGGGGSGGGGSGGGGSQTVVTQEPSLTVSPGGTVTLTCASSTGAVTSGNYPNWVQQKPGQAPRGLIGGTKFLVPGTPARFSGSLLGGKAALTLSGVQPEDEAEYYCTLWYSNRWVFGGGTKLTVLHHHHHH

SEQ ID NO: 3258 - protein, 507 aa, synthetic construct
  REGION 1..507: note = Description of Artificial Sequence: Synthetic polypeptide
EVQLVESGGGLVQPGRSLTLSCAASTNIASISPMGWYRQAPGKQRELVAAIHGSSTLYADSVKGRFTISRDNAKNSIYLQMNSLRPEDTALYYCNKVPWGDYHPGNVYWGQGTQVTVSSGGGGSGGGSEVQLVESGGGLVQPGNSLRLSCAASGFTFSKFGMSWVRQAPGKGLEWVSSISGSGRDTLYADSVKGRFTISRDNAKTTLYLQMNSLRPEDTAVYYCTIGGSLSVSSQGTLVTVSSGGGGSGGGSEVQLVESGGGLVQPGGSLKLSCAASGFTFNKYAINWVRQAPGKGLEWVARIRSKYNNYATYYADQVKDRFTISRDDSKNTAYLQMNNLKTEDTAVYYCVRHANFGNSYISYWAYWGQGTLVTVSSGGGGSGGGGSGGGGSQTVVTQEPSLTVSPGGTVTLTCASSTGAVTSGNYPNWVQQKPGQAPRGLIGGTKFLVPGTPARFSGSLLGGKAALTLSGVQPEDEAEYYCTLWYSNRWVFGGGTKLTVLHHHHHH

SEQ ID NO: 3259 - protein, 507 aa, synthetic construct
  REGION 1..507: note = Description of Artificial Sequence: Synthetic polypeptide
EVQLVESGGGLVQPGRSLTLSCAASTNITSISPMGWYRQAPGKQRELVAAIHGDSTLYADSVKGRFTISRDNAKNSIYLQMNSLRPEDTALYYCNKVPWGDYHPGNVYWGQGTQVTVSSGGGGSGGGSEVQLVESGGGLVQPGNSLRLSCAASGFTFSKFGMSWVRQAPGKGLEWVSSISGSGRDTLYADSVKGRFTISRDNAKTTLYLQMNSLRPEDTAVYYCTIGGSLSVSSQGTLVTVSSGGGGSGGGSEVQLVESGGGLVQPGGSLKLSCAASGFTFNKYAINWVRQAPGKGLEWVARIRSKYNNYATYYADQVKDRFTISRDDSKNTAYLQMNNLKTEDTAVYYCVRHANFGNSYISYWAYWGQGTLVTVSSGGGGSGGGGSGGGGSQTVVTQEPSLTVSPGGTVTLTCASSTGAVTSGNYPNWVQQKPGQAPRGLIGGTKFLVPGTPARFSGSLLGGKAALTLSGVQPEDEAEYYCTLWYSNRWVFGGGTKLTVLHHHHHH

SEQ ID NO: 3260 - protein, 507 aa, synthetic construct
  REGION 1..507: note = Description of Artificial Sequence: Synthetic polypeptide
EVQLVESGGGLVQPGRSLTLSCAASTNIMSISPMGWYRQAPGKQRELVAAIHGNSTLYADSVKGRFTISRDNAKNSIYLQMNSLRPEDTALYYCNKVPWGDYHPGNVYWGQGTQVTVSSGGGGSGGGSEVQLVESGGGLVQPGNSLRLSCAASGFTFSKFGMSWVRQAPGKGLEWVSSISGSGRDTLYADSVKGRFTISRDNAKTTLYLQMNSLRPEDTAVYYCTIGGSLSVSSQGTLVTVSSGGGGSGGGSEVQLVESGGGLVQPGGSLKLSCAASGFTFNKYAINWVRQAPGKGLEWVARIRSKYNNYATYYADQVKDRFTISRDDSKNTAYLQMNNLKTEDTAVYYCVRHANFGNSYISYWAYWGQGTLVTVSSGGGGSGGGGSGGGGSQTVVTQEPSLTVSPGGTVTLTCASSTGAVTSGNYPNWVQQKPGQAPRGLIGGTKFLVPGTPARFSGSLLGGKAALTLSGVQPEDEAEYYCTLWYSNRWVFGGGTKLTVLHHHHHH

SEQ ID NO: 3261 - protein, 507 aa, synthetic construct
  REGION 1..507: note = Description of Artificial Sequence: Synthetic polypeptide
EVQLVESGGGLVQPGRSLTLSCAASTNITSISPMGWYRQAPGKQRELVAAIHGNSTLYADSVKGRFTISRDNAKNSIYLQMNSLRPEDTALYYCNKVPWGDYHPGNVYWGQGTQVTVSSGGGGSGGGSEVQLVESGGGLVQPGNSLRLSCAASGFTFSKFGMSWVRQAPGKGLEWVSSISGSGRDTLYADSVKGRFTISRDNAKTTLYLQMNSLRPEDTAVYYCTIGGSLSVSSQGTLVTVSSGGGGSGGGSEVQLVESGGGLVQPGGSLKLSCAASGFTFNKYAINWVRQAPGKGLEWVARIRSKYNNYATYYADQVKDRFTISRDDSKNTAYLQMNNLKTEDTAVYYCVRHANFGNSYISYWAYWGQGTLVTVSSGGGGSGGGGSGGGGSQTVVTQEPSLTVSPGGTVTLTCASSTGAVTSGNYPNWVQQKPGQAPRGLIGGTKFLVPGTPARFSGSLLGGKAALTLSGVQPEDEAEYYCTLWYSNRWVFGGGTKLTVLHHHHHH

SEQ ID NO: 3262 - protein, 507 aa, synthetic construct
  REGION 1..507: note = Description of Artificial Sequence: Synthetic polypeptide
EVQLVESGGGLVQPGRSLTLSCAASTNIVSISPMGWYRQAPGKQRELVAAIHGHSTLYADSVKGRFTISRDNAKNSIYLQMNSLRPEDTALYYCNKVPWGDYHPGNVYWGQGTQVTVSSGGGGSGGGSEVQLVESGGGLVQPGNSLRLSCAASGFTFSKFGMSWVRQAPGKGLEWVSSISGSGRDTLYADSVKGRFTISRDNAKTTLYLQMNSLRPEDTAVYYCTIGGSLSVSSQGTLVTVSSGGGGSGGGSEVQLVESGGGLVQPGGSLKLSCAASGFTFNKYAINWVRQAPGKGLEWVARIRSKYNNYATYYADQVKDRFTISRDDSKNTAYLQMNNLKTEDTAVYYCVRHANFGNSYISYWAYWGQGTLVTVSSGGGGSGGGGSGGGGSQTVVTQEPSLTVSPGGTVTLTCASSTGAVTSGNYPNWVQQKPGQAPRGLIGGTKFLVPGTPARFSGSLLGGKAALTLSGVQPEDEAEYYCTLWYSNRWVFGGGTKLTVLHHHHHH

SEQ ID NO: 3263 - protein, 507 aa, synthetic construct
  REGION 1..507: note = Description of Artificial Sequence: Synthetic polypeptide
EVQLVESGGGLVQPGRSLTLSCAASTNIVSISPMGWYRQAPGKQRELVAAIHGKSTLYADSVKGRFTISRDNAKNSIYLQMNSLRPEDTALYYCNKVPWGDYHPGNVYWGQGTQVTVSSGGGGSGGGSEVQLVESGGGLVQPGNSLRLSCAASGFTFSKFGMSWVRQAPGKGLEWVSSISGSGRDTLYADSVKGRFTISRDNAKTTLYLQMNSLRPEDTAVYYCTIGGSLSVSSQGTLVTVSSGGGGSGGGSEVQLVESGGGLVQPGGSLKLSCAASGFTFNKYAINWVRQAPGKGLEWVARIRSKYNNYATYYADQVKDRFTISRDDSKNTAYLQMNNLKTEDTAVYYCVRHANFGNSYISYWAYWGQGTLVTVSSGGGGSGGGGSGGGGSQTVVTQEPSLTVSPGGTVTLTCASSTGAVTSGNYPNWVQQKPGQAPRGLIGGTKFLVPGTPARFSGSLLGGKAALTLSGVQPEDEAEYYCTLWYSNRWVFGGGTKLTVLHHHHHH

SEQ ID NO: 3264 - protein, 507 aa, synthetic construct
  REGION 1..507: note = Description of Artificial Sequence: Synthetic polypeptide
EVQLVESGGGLVQPGRSLTLSCAASTNVVSISPMGWYRQAPGKQRELVAAIHGKSTLYADSVKGRFTISRDNAKNSIYLQMNSLRPEDTALYYCNKVPWGDYHPNNVYWGQGTQVTVSSGGGGSGGGSEVQLVESGGGLVQPGNSLRLSCAASGFTFSKFGMSWVRQAPGKGLEWVSSISGSGRDTLYADSVKGRFTISRDNAKTTLYLQMNSLRPEDTAVYYCTIGGSLSVSSQGTLVTVSSGGGGSGGGSEVQLVESGGGLVQPGGSLKLSCAASGFTFNKYAINWVRQAPGKGLEWVARIRSKYNNYATYYADQVKDRFTISRDDSKNTAYLQMNNLKTEDTAVYYCVRHANFGNSYISYWAYWGQGTLVTVSSGGGGSGGGGSGGGGSQTVVTQEPSLTVSPGGTVTLTCASSTGAVTSGNYPNWVQQKPGQAPRGLIGGTKFLVPGTPARFSGSLLGGKAALTLSGVQPEDEAEYYCTLWYSNRWVFGGGTKLTVLHHHHHH

SEQ ID NO: 3265 - protein, 507 aa, synthetic construct
  REGION 1..507: note = Description of Artificial Sequence: Synthetic polypeptide
EVQLVESGGGLVQPGRSLTLSCAASTNIISISPMGWYRQAPGKQRELVAAIHGASTLYADSVKGRFTISRDNAKNSIYLQMNSLRPEDTALYYCNKVPWGDYHPGNVYWGQGTQVTVSSGGGGSGGGSEVQLVESGGGLVQPGNSLRLSCAASGFTFSKFGMSWVRQAPGKGLEWVSSISGSGRDTLYADSVKGRFTISRDNAKTTLYLQMNSLRPEDTAVYYCTIGGSLSVSSQGTLVTVSSGGGGSGGGSEVQLVESGGGLVQPGGSLKLSCAASGFTFNKYAINWVRQAPGKGLEWVARIRSKYNNYATYYADQVKDRFTISRDDSKNTAYLQMNNLKTEDTAVYYCVRHANFGNSYISYWAYWGQGTLVTVSSGGGGSGGGGSGGGGSQTVVTQEPSLTVSPGGTVTLTCASSTGAVTSGNYPNWVQQKPGQAPRGLIGGTKFLVPGTPARFSGSLLGGKAALTLSGVQPEDEAEYYCTLWYSNRWVFGGGTKLTVLHHHHHH

SEQ ID NO: 3266 - protein, 507 aa, synthetic construct
  REGION 1..507: note = Description of Artificial Sequence: Synthetic polypeptide
EVQLVESGGGLVQPGRSLTLSCAASTNIFSITPMGWYRQAPGKQRELVAAIHGASTLYADSVKGRFTISRDNAKNSIYLQMNSLRPEDTALYYCNKVPWGDYHPGNVYWGQGTQVTVSSGGGGSGGGSEVQLVESGGGLVQPGNSLRLSCAASGFTFSKFGMSWVRQAPGKGLEWVSSISGSGRDTLYADSVKGRFTISRDNAKTTLYLQMNSLRPEDTAVYYCTIGGSLSVSSQGTLVTVSSGGGGSGGGSEVQLVESGGGLVQPGGSLKLSCAASGFTFNKYAINWVRQAPGKGLEWVARIRSKYNNYATYYADQVKDRFTISRDDSKNTAYLQMNNLKTEDTAVYYCVRHANFGNSYISYWAYWGQGTLVTVSSGGGGSGGGGSGGGGSQTVVTQEPSLTVSPGGTVTLTCASSTGAVTSGNYPNWVQQKPGQAPRGLIGGTKFLVPGTPARFSGSLLGGKAALTLSGVQPEDEAEYYCTLWYSNRWVFGGGTKLTVLHHHHHH

SEQ ID NO: 3267 - protein, 507 aa, synthetic construct
  REGION 1..507: note = Description of Artificial Sequence: Synthetic polypeptide
EVQLVESGGGLVQPGRSLTLSCAASTNITSISPMGWYRQAPGKQRELVAAIHGFETLYADSVKGRFTISRDNAKNSIYLQMNSLRPEDTALYYCNKVPWGDYHPGNVYWGQGTQVTVSSGGGGSGGGSEVQLVESGGGLVQPGNSLRLSCAASGFTFSKFGMSWVRQAPGKGLEWVSSISGSGRDTLYADSVKGRFTISRDNAKTTLYLQMNSLRPEDTAVYYCTIGGSLSVSSQGTLVTVSSGGGGSGGGSEVQLVESGGGLVQPGGSLKLSCAASGFTFNKYAINWVRQAPGKGLEWVARIRSKYNNYATYYADQVKDRFTISRDDSKNTAYLQMNNLKTEDTAVYYCVRHANFGNSYISYWAYWGQGTLVTVSSGGGGSGGGGSGGGGSQTVVTQEPSLTVSPGGTVTLTCASSTGAVTSGNYPNWVQQKPGQAPRGLIGGTKFLVPGTPARFSGSLLGGKAALTLSGVQPEDEAEYYCTLWYSNRWVFGGGTKLTVLHHHHHH

SEQ ID NO: 3268 - protein, 507 aa, synthetic construct
  REGION 1..507: note = Description of Artificial Sequence: Synthetic polypeptide
EVQLVESGGGLVQPGRSLTLSCAASTNIQSISPMGWYRQAPGKQRELVAAIHGFETLYADSVKGRFTISRDNAKNSIYLQMNSLRPEDTALYYCNKVPWGDYHPGNVYWGQGTQVTVSSGGGGSGGGSEVQLVESGGGLVQPGNSLRLSCAASGFTFSKFGMSWVRQAPGKGLEWVSSISGSGRDTLYADSVKGRFTISRDNAKTTLYLQMNSLRPEDTAVYYCTIGGSLSVSSQGTLVTVSSGGGGSGGGSEVQLVESGGGLVQPGGSLKLSCAASGFTFNKYAINWVRQAPGKGLEWVARIRSKYNNYATYYADQVKDRFTISRDDSKNTAYLQMNNLKTEDTAVYYCVRHANFGNSYISYWAYWGQGTLVTVSSGGGGSGGGGSGGGGSQTVVTQEPSLTVSPGGTVTLTCASSTGAVTSGNYPNWVQQKPGQAPRGLIGGTKFLVPGTPARFSGSLLGGKAALTLSGVQPEDEAEYYCTLWYSNRWVFGGGTKLTVLHHHHHH

SEQ ID NO: 3269 - protein, 507 aa, synthetic construct
  REGION 1..507: note = Description of Artificial Sequence: Synthetic polypeptide
EVQLVESGGGLVQPGRSLTLSCAASTSDFSISPMGWYRQAPGKQRELVAAIHGFETLYADSVKGRFTISRDNAKNSIYLQMNSLRPEDTALYYCNKVPWGDYHPGNVYWGQGTQVTVSSGGGGSGGGSEVQLVESGGGLVQPGNSLRLSCAASGFTFSKFGMSWVRQAPGKGLEWVSSISGSGRDTLYADSVKGRFTISRDNAKTTLYLQMNSLRPEDTAVYYCTIGGSLSVSSQGTLVTVSSGGGGSGGGSEVQLVESGGGLVQPGGSLKLSCAASGFTFNKYAINWVRQAPGKGLEWVARIRSKYNNYATYYADQVKDRFTISRDDSKNTAYLQMNNLKTEDTAVYYCVRHANFGNSYISYWAYWGQGTLVTVSSGGGGSGGGGSGGGGSQTVVTQEPSLTVSPGGTVTLTCASSTGAVTSGNYPNWVQQKPGQAPRGLIGGTKFLVPGTPARFSGSLLGGKAALTLSGVQPEDEAEYYCTLWYSNRWVFGGGTKLTVLHHHHHH

SEQ ID NO: 3270 - protein, 507 aa, synthetic construct
  REGION 1..507: note = Description of Artificial Sequence: Synthetic polypeptide
EVQLVESGGGLVQPGRSLTLSCAASTNIDSISPMGWYRQAPGKQRELVAAIHGFQTLYADSVKGRFTISRDNAKNSIYLQMNSLRPEDTALYYCNKVPWGDYHPGNVYWGQGTQVTVSSGGGGSGGGSEVQLVESGGGLVQPGNSLRLSCAASGFTFSKFGMSWVRQAPGKGLEWVSSISGSGRDTLYADSVKGRFTISRDNAKTTLYLQMNSLRPEDTAVYYCTIGGSLSVSSQGTLVTVSSGGGGSGGGSEVQLVESGGGLVQPGGSLKLSCAASGFTFNKYAINWVRQAPGKGLEWVARIRSKYNNYATYYADQVKDRFTISRDDSKNTAYLQMNNLKTEDTAVYYCVRHANFGNSYISYWAYWGQGTLVTVSSGGGGSGGGGSGGGGSQTVVTQEPSLTVSPGGTVTLTCASSTGAVTSGNYPNWVQQKPGQAPRGLIGGTKFLVPGTPARFSGSLLGGKAALTLSGVQPEDEAEYYCTLWYSNRWVFGGGTKLTVLHHHHHH

SEQ ID NO: 3271 - protein, 507 aa, synthetic construct
  REGION 1..507: note = Description of Artificial Sequence: Synthetic polypeptide
EVQLVESGGGLVQPGRSLTLSCAASTNIMSISPMGWYRQAPGKQRELVAAIHGFSTVYADSVKGRFTISRDNAKNSIYLQMNSLRPEDTALYYCNKVPWGDYHPGNVYWGQGTQVTVSSGGGGSGGGSEVQLVESGGGLVQPGNSLRLSCAASGFTFSKFGMSWVRQAPGKGLEWVSSISGSGRDTLYADSVKGRFTISRDNAKTTLYLQMNSLRPEDTAVYYCTIGGSLSVSSQGTLVTVSSGGGGSGGGSEVQLVESGGGLVQPGGSLKLSCAASGFTFNKYAINWVRQAPGKGLEWVARIRSKYNNYATYYADQVKDRFTISRDDSKNTAYLQMNNLKTEDTAVYYCVRHANFGNSYISYWAYWGQGTLVTVSSGGGGSGGGGSGGGGSQTVVTQEPSLTVSPGGTVTLTCASSTGAVTSGNYPNWVQQKPGQAPRGLIGGTKFLVPGTPARFSGSLLGGKAALTLSGVQPEDEAEYYCTLWYSNRWVFGGGTKLTVLHHHHHH

SEQ ID NO: 3272 - protein, 507 aa, synthetic construct
  REGION 1..507: note = Description of Artificial Sequence: Synthetic polypeptide
EVQLVESGGGLVQPGRSLTLSCAASTNIESISPMGWYRQAPGKQRELVAAIHGFSTLYADSVKGRFTISRDNAKNSIYLQMNSLRPEDTALYYCNKVPWGDYHPGNVYWGQGTQVTVSSGGGGSGGGSEVQLVESGGGLVQPGNSLRLSCAASGFTFSKFGMSWVRQAPGKGLEWVSSISGSGRDTLYADSVKGRFTISRDNAKTTLYLQMNSLRPEDTAVYYCTIGGSLSVSSQGTLVTVSSGGGGSGGGSEVQLVESGGGLVQPGGSLKLSCAASGFTFNKYAINWVRQAPGKGLEWVARIRSKYNNYATYYADQVKDRFTISRDDSKNTAYLQMNNLKTEDTAVYYCVRHANFGNSYISYWAYWGQGTLVTVSSGGGGSGGGGSGGGGSQTVVTQEPSLTVSPGGTVTLTCASSTGAVTSGNYPNWVQQKPGQAPRGLIGGTKFLVPGTPARFSGSLLGGKAALTLSGVQPEDEAEYYCTLWYSNRWVFGGGTKLTVLHHHHHH

SEQ ID NO: 3273 - protein, 507 aa, synthetic construct
  REGION 1..507: note = Description of Artificial Sequence: Synthetic polypeptide
EVQLVESGGGLVQPGRSLTLSCAASTNIFSSSPMGWYRQAPGKQRELVAAIHGFKTLYADSVKGRFTISRDNAKNSIYLQMNSLRPEDTARYYCNKVPWGDYHPGNVYWGQGTQVTVSSGGGGSGGGSEVQLVESGGGLVQPGNSLRLSCAASGFTFSKFGMSWVRQAPGKGLEWVSSISGSGRDTLYADSVKGRFTISRDNAKTTLYLQMNSLRPEDTAVYYCTIGGSLSVSSQGTLVTVSSGGGGSGGGSEVQLVESGGGLVQPGGSLKLSCAASGFTFNKYAINWVRQAPGKGLEWVARIRSKYNNYATYYADQVKDRFTISRDDSKNTAYLQMNNLKTEDTAVYYCVRHANFGNSYISYWAYWGQGTLVTVSSGGGGSGGGGSGGGGSQTVVTQEPSLTVSPGGTVTLTCASSTGAVTSGNYPNWVQQKPGQAPRGLIGGTKFLVPGTPARFSGSLLGGKAALTLSGVQPEDEAEYYCTLWYSNRWVFGGGTKLTVLHHHHHH

SEQ ID NO: 3274 - protein, 507 aa, synthetic construct
  REGION 1..507: note = Description of Artificial Sequence: Synthetic polypeptide
EVQLVESGGGLVQPGRSLTLSCAASTNIFSSSPMGWYRQAPGKQRELVAAIHGFSTLYADSVKGRFTISRDNAKNSIYLQMNSLRPEDTALYYCNKVPWGDYHPGNVYWGQGTQVTVSSGGGGSGGGSEVQLVESGGGLVQPGNSLRLSCAASGFTFSKFGMSWVRQAPGKGLEWVSSISGSGRDTLYADSVKGRFTISRDNAKTTLYLQMNSLRPEDTAVYYCTIGGSLSVSSQGTLVTVSSGGGGSGGGSEVQLVESGGGLVQPGGSLKLSCAASGFTFNKYAINWVRQAPGKGLEWVARIRSKYNNYATYYADQVKDRFTISRDDSKNTAYLQMNNLKTEDTAVYYCVRHANFGNSYISYWAYWGQGTLVTVSSGGGGSGGGGSGGGGSQTVVTQEPSLTVSPGGTVTLTCASSTGAVTSGNYPNWVQQKPGQAPRGLIGGTKFLVPGTPARFSGSLLGGKAALTLSGVQPEDEAEYYCTLWYSNRWVFGGGTKLTVLHHHHHH

SEQ ID NO: 3275 - protein, 507 aa, synthetic construct
  REGION 1..507: note = Description of Artificial Sequence: Synthetic polypeptide
EVQLVESGGGLVQPGRSLTLSCAASTNIFSNSPMGWYRQAPGKQRELVAAIHGFSTLYADSVKGRFTISRDNAKNSIYLQMNSLRPEDTALYYCNKVPWGDYHPGNVYWGQGTQVTVSSGGGGSGGGSEVQLVESGGGLVQPGNSLRLSCAASGFTFSKFGMSWVRQAPGKGLEWVSSISGSGRDTLYADSVKGRFTISRDNAKTTLYLQMNSLRPEDTAVYYCTIGGSLSVSSQGTLVTVSSGGGGSGGGSEVQLVESGGGLVQPGGSLKLSCAASGFTFNKYAINWVRQAPGKGLEWVARIRSKYNNYATYYADQVKDRFTISRDDSKNTAYLQMNNLKTEDTAVYYCVRHANFGNSYISYWAYWGQGTLVTVSSGGGGSGGGGSGGGGSQTVVTQEPSLTVSPGGTVTLTCASSTGAVTSGNYPNWVQQKPGQAPRGLIGGTKFLVPGTPARFSGSLLGGKAALTLSGVQPEDEAEYYCTLWYSNRWVFGGGTKLTVLHHHHHH

SEQ ID NO: 3276 - protein, 507 aa, synthetic construct
  REGION 1..507: note = Description of Artificial Sequence: Synthetic polypeptide
EVQLVESGGGLVQPGRSLTLSCAASTNIFSTSPMGWYRQAPGKQRELVAAIHGFSTIYADSVKGRFTISRDNAKNSIYLQMNSLRPEDTALYYCNKVPWGDYHPGNVYWGQGTQVTVSSGGGGSGGGSEVQLVESGGGLVQPGNSLRLSCAASGFTFSKFGMSWVRQAPGKGLEWVSSISGSGRDTLYADSVKGRFTISRDNAKTTLYLQMNSLRPEDTAVYYCTIGGSLSVSSQGTLVTVSSGGGGSGGGSEVQLVESGGGLVQPGGSLKLSCAASGFTFNKYAINWVRQAPGKGLEWVARIRSKYNNYATYYADQVKDRFTISRDDSKNTAYLQMNNLKTEDTAVYYCVRHANFGNSYISYWAYWGQGTLVTVSSGGGGSGGGGSGGGGSQTVVTQEPSLTVSPGGTVTLTCASSTGAVTSGNYPNWVQQKPGQAPRGLIGGTKFLVPGTPARFSGSLLGGKAALTLSGVQPEDEAEYYCTLWYSNRWVFGGGTKLTVLHHHHHH

SEQ ID NO: 3277 - protein, 507 aa, synthetic construct
  REGION 1..507: note = Description of Artificial Sequence: Synthetic polypeptide
EVQLVESGGGLVQPGRSLTLSCAASTNIFSTSPMGWYRQAPGKQRELVAAIHGFSTIYADSVKGRFTISRDNAKNSIYLQMNSLRPEDTALYYCNKVPWGDYHPLNVYWGQGTQVTVSSGGGGSGGGSEVQLVESGGGLVQPGNSLRLSCAASGFTFSKFGMSWVRQAPGKGLEWVSSISGSGRDTLYADSVKGRFTISRDNAKTTLYLQMNSLRPEDTAVYYCTIGGSLSVSSQGTLVTVSSGGGGSGGGSEVQLVESGGGLVQPGGSLKLSCAASGFTFNKYAINWVRQAPGKGLEWVARIRSKYNNYATYYADQVKDRFTISRDDSKNTAYLQMNNLKTEDTAVYYCVRHANFGNSYISYWAYWGQGTLVTVSSGGGGSGGGGSGGGGSQTVVTQEPSLTVSPGGTVTLTCASSTGAVTSGNYPNWVQQKPGQAPRGLIGGTKFLVPGTPARFSGSLLGGKAALTLSGVQPEDEAEYYCTLWYSNRWVFGGGTKLTVLHHHHHH

SEQ ID NO: 3278 - protein, 507 aa, synthetic construct
  REGION 1..507: note = Description of Artificial Sequence: Synthetic polypeptide
EVQLVESGGGLVQPGRSLTLSCVASTNIFSTSPMGWYRQAPGKQRELVAAIHGFSTLYADSVKGRFTISRDNAKNSIYLQMNSLRPEDTALYYCNKVPWGDYHPGNVYWGQGTQVTVSSGGGGSGGGSEVQLVESGGGLVQPGNSLRLSCAASGFTFSKFGMSWVRQAPGKGLEWVSSISGSGRDTLYADSVKGRFTISRDNAKTTLYLQMNSLRPEDTAVYYCTIGGSLSVSSQGTLVTVSSGGGGSGGGSEVQLVESGGGLVQPGGSLKLSCAASGFTFNKYAINWVRQAPGKGLEWVARIRSKYNNYATYYADQVKDRFTISRDDSKNTAYLQMNNLKTEDTAVYYCVRHANFGNSYISYWAYWGQGTLVTVSSGGGGSGGGGSGGGGSQTVVTQEPSLTVSPGGTVTLTCASSTGAVTSGNYPNWVQQKPGQAPRGLIGGTKFLVPGTPARFSGSLLGGKAALTLSGVQPEDEAEYYCTLWYSNRWVFGGGTKLTVLHHHHHH

SEQ ID NO: 3279 - protein, 507 aa, synthetic construct
  REGION 1..507: note = Description of Artificial Sequence: Synthetic polypeptide
EVQLVESGGGLVQPGRSLTLSCAASTNIFSDSPMGWYRQAPGKQRELVAAIHGFSTFYADSVKGRFTISRDNAKNSIYLQMNSLRPEDTALYYCNKVPWGDYHPGNVYWGQGTQVTVSSGGGGSGGGSEVQLVESGGGLVQPGNSLRLSCAASGFTFSKFGMSWVRQAPGKGLEWVSSISGSGRDTLYADSVKGRFTISRDNAKTTLYLQMNSLRPEDTAVYYCTIGGSLSVSSQGTLVTVSSGGGGSGGGSEVQLVESGGGLVQPGGSLKLSCAASGFTFNKYAINWVRQAPGKGLEWVARIRSKYNNYATYYADQVKDRFTISRDDSKNTAYLQMNNLKTEDTAVYYCVRHANFGNSYISYWAYWGQGTLVTVSSGGGGSGGGGSGGGGSQTVVTQEPSLTVSPGGTVTLTCASSTGAVTSGNYPNWVQQKPGQAPRGLIGGTKFLVPGTPARFSGSLLGGKAALTLSGVQPEDEAEYYCTLWYSNRWVFGGGTKLTVLHHHHHH

SEQ ID NO: 3280 - protein, 507 aa, synthetic construct
  REGION 1..507: note = Description of Artificial Sequence: Synthetic polypeptide
EVQLVESGGGLVQPGRSLTLSCAASTNIFSQSPMGWYRQAPGKQRELVAAIHGDSTLYADSVKGRFTISRDNAKNSIYLQMNSLRPEDTALYYCNKVPWGDYHPGNVCWGQGTQVTVSSGGGGSGGGSEVQLVESGGGLVQPGNSLRLSCAASGFTFSKFGMSWVRQAPGKGLEWVSSISGSGRDTLYADSVKGRFTISRDNAKTTLYLQMNSLRPEDTAVYYCTIGGSLSVSSQGTLVTVSSGGGGSGGGSEVQLVESGGGLVQPGGSLKLSCAASGFTFNKYAINWVRQAPGKGLEWVARIRSKYNNYATYYADQVKDRFTISRDDSKNTAYLQMNNLKTEDTAVYYCVRHANFGNSYISYWAYWGQGTLVTVSSGGGGSGGGGSGGGGSQTVVTQEPSLTVSPGGTVTLTCASSTGAVTSGNYPNWVQQKPGQAPRGLIGGTKFLVPGTPARFSGSLLGGKAALTLSGVQPEDEAEYYCTLWYSNRWVFGGGTKLTVLHHHHHH

SEQ ID NO: 3281 - protein, 507 aa, synthetic construct
  REGION 1..507: note = Description of Artificial Sequence: Synthetic polypeptide
EVQLVESGGGLVQPGRSLTLSCAASTNIFSQSPMGWYRQAPGKQRELVAAIHGKSTLYADSVKGRFTISRDNAKNSIYLQMNSLRPEDTALYYCNKVPWGDYHPSNVYWGKGTQVTVSSGGGGSGGGSEVQLVESGGGLVQPGNSLRLSCAASGFTFSKFGMSWVRQAPGKGLEWVSSISGSGRDTLYADSVKGRFTISRDNAKTTLYLQMNSLRPEDTAVYYCTIGGSLSVSSQGTLVTVSSGGGGSGGGSEVQLVESGGGLVQPGGSLKLSCAASGFTFNKYAINWVRQAPGKGLEWVARIRSKYNNYATYYADQVKDRFTISRDDSKNTAYLQMNNLKTEDTAVYYCVRHANFGNSYISYWAYWGQGTLVTVSSGGGGSGGGGSGGGGSQTVVTQEPSLTVSPGGTVTLTCASSTGAVTSGNYPNWVQQKPGQAPRGLIGGTKFLVPGTPARFSGSLLGGKAALTLSGVQPEDEAEYYCTLWYSNRWVFGGGTKLTVLHHHHHH

SEQ ID NO: 3282 - protein, 507 aa, synthetic construct
  REGION 1..507: note = Description of Artificial Sequence: Synthetic polypeptide
EVQLVESGGGLVQPGRSLTLSCAASTNIFSRSPMGWYRQAPGKQRELVAAIHGESTLYADSVKGRFTISRDNAKNSIYLQMNSLRPEDTALYYCNKVPWGRYHPGNVYWGQGTQVTVSSGGGGSGGGSEVQLVESGGGLVQPGNSLRLSCAASGFTFSKFGMSWVRQAPGKGLEWVSSISGSGRDTLYADSVKGRFTISRDNAKTTLYLQMNSLRPEDTAVYYCTIGGSLSVSSQGTLVTVSSGGGGSGGGSEVQLVESGGGLVQPGGSLKLSCAASGFTFNKYAINWVRQAPGKGLEWVARIRSKYNNYATYYADQVKDRFTISRDDSKNTAYLQMNNLKTEDTAVYYCVRHANFGNSYISYWAYWGQGTLVTVSSGGGGSGGGGSGGGGSQTVVTQEPSLTVSPGGTVTLTCASSTGAVTSGNYPNWVQQKPGQAPRGLIGGTKFLVPGTPARFSGSLLGGKAALTLSGVQPEDEAEYYCTLWYSNRWVFGGGTKLTVLHHHHHH

SEQ ID NO: 3283 - protein, 507 aa, synthetic construct
  REGION 1..507: note = Description of Artificial Sequence: Synthetic polypeptide
EVQLVESGGGLVQPGRSLTLSCAASTNIFSRSPMGWYRQAPGKQRELVAAIHGISTLYADSVKGRFTISRDNAKNSIYLQMNSLRPEDTALYYCNKVPWGDYHPGNVYWGQGTQVTVSSGGGGSGGGSEVQLVESGGGLVQPGNSLRLSCAASGFTFSKFGMSWVRQAPGKGLEWVSSISGSGRDTLYADSVKGRFTISRDNAKTTLYLQMNSLRPEDTAVYYCTIGGSLSVSSQGTLVTVSSGGGGSGGGSEVQLVESGGGLVQPGGSLKLSCAASGFTFNKYAINWVRQAPGKGLEWVARIRSKYNNYATYYADQVKDRFTISRDDSKNTAYLQMNNLKTEDTAVYYCVRHANFGNSYISYWAYWGQGTLVTVSSGGGGSGGGGSGGGGSQTVVTQEPSLTVSPGGTVTLTCASSTGAVTSGNYPNWVQQKPGQAPRGLIGGTKFLVPGTPARFSGSLLGGKAALTLSGVQPEDEAEYYCTLWYSNRWVFGGGTKLTVLHHHHHH

SEQ ID NO: 3284 - protein, 507 aa, synthetic construct
  REGION 1..507: note = Description of Artificial Sequence: Synthetic polypeptide
EVQLVESGGGLVQPGRSLTLSCAASTNIFSRSPMGWYRQAPGKQRELVAAIHGSSTLYADSVKGRFTISRDNAKNSIYLQMNSLRPEDTALYYCNKVPWGDYHPGNVYWGQGTQVTVSSGGGGSGGGSEVQLVESGGGLVQPGNSLRLSCAASGFTFSKFGMSWVRQAPGKGLEWVSSISGSGRDTLYADSVKGRFTISRDNAKTTLYLQMNSLRPEDTAVYYCTIGGSLSVSSQGTLVTVSSGGGGSGGGSEVQLVESGGGLVQPGGSLKLSCAASGFTFNKYAINWVRQAPGKGLEWVARIRSKYNNYATYYADQVKDRFTISRDDSKNTAYLQMNNLKTEDTAVYYCVRHANFGNSYISYWAYWGQGTLVTVSSGGGGSGGGGSGGGGSQTVVTQEPSLTVSPGGTVTLTCASSTGAVTSGNYPNWVQQKPGQAPRGLIGGTKFLVPGTPARFSGSLLGGKAALTLSGVQPEDEAEYYCTLWYSNRWVFGGGTKLTVLHHHHHH

SEQ ID NO: 3285 - protein, 507 aa, synthetic construct
  REGION 1..507: note = Description of Artificial Sequence: Synthetic polypeptide
EVQLVESGGGLVQPGRSLTLSCAASTNIFSGSPMGWYRQAPGKQRELVAAIHGNSTLYADSVKGRFTISRDNAKNSIYLQMNSLRPEDTALYYCNKVPWGDYHPGNVYWGQGTQVTVSSGGGGSGGGSEVQLVESGGGLVQPGNSLRLSCAASGFTFSKFGMSWVRQAPGKGLEWVSSISGSGRDTLYADSVKGRFTISRDNAKTTLYLQMNSLRPEDTAVYYCTIGGSLSVSSQGTLVTVSSGGGGSGGGSEVQLVESGGGLVQPGGSLKLSCAASGFTFNKYAINWVRQAPGKGLEWVARIRSKYNNYATYYADQVKDRFTISRDDSKNTAYLQMNNLKTEDTAVYYCVRHANFGNSYISYWAYWGQGTLVTVSSGGGGSGGGGSGGGGSQTVVTQEPSLTVSPGGTVTLTCASSTGAVTSGNYPNWVQQKPGQAPRGLIGGTKFLVPGTPARFSGSLLGGKAALTLSGVQPEDEAEYYCTLWYSNRWVFGGGTKLTVLHHHHHH

SEQ ID NO: 3286 - protein, 507 aa, synthetic construct
  REGION 1..507: note = Description of Artificial Sequence: Synthetic polypeptide
EVQLVESGGGLVQPGRSLTLSCAASSNIFSISPMGWYRQAPGKQRELVAAIHGSSTLYADSVKGRFTISRDNAKNSIYLQMNSLRPEDTALYYCNKVPWGDYHPGNVYWGQGTQVTVSSGGGGSGGGSEVQLVESGGGLVQPGNSLRLSCAASGFTFSKFGMSWVRQAPGKGLEWVSSISGSGRDTLYADSVKGRFTISRDNAKTTLYLQMNSLRPEDTAVYYCTIGGSLSVSSQGTLVTVSSGGGGSGGGSEVQLVESGGGLVQPGGSLKLSCAASGFTFNKYAINWVRQAPGKGLEWVARIRSKYNNYATYYADQVKDRFTISRDDSKNTAYLQMNNLKTEDTAVYYCVRHANFGNSYISYWAYWGQGTLVTVSSGGGGSGGGGSGGGGSQTVVTQEPSLTVSPGGTVTLTCASSTGAVTSGNYPNWVQQKPGQAPRGLIGGTKFLVPGTPARFSGSLLGGKAALTLSGVQPEDEAEYYCTLWYSNRWVFGGGTKLTVLHHHHHH

SEQ ID NO: 3287 - protein, 507 aa, synthetic construct
  REGION 1..507: note = Description of Artificial Sequence: Synthetic polypeptide
EVQLVESGGGLVQPGRSLTLSCAASTNIFSIYPMGWYRQAPGKQRELVAAIHGSSTLYADSVKGRFTISRDNAKNSIYLQMNSLRPEDTALYYCNKVPWGDYHPKNVYWGQGTQVTVSSGGGGSGGGSEVQLVESGGGLVQPGNSLRLSCAASGFTFSKFGMSWVRQAPGKGLEWVSSISGSGRDTLYADSVKGRFTISRDNAKTTLYLQMNSLRPEDTAVYYCTIGGSLSVSSQGTLVTVSSGGGGSGGGSEVQLVESGGGLVQPGGSLKLSCAASGFTFNKYAINWVRQAPGKGLEWVARIRSKYNNYATYYADQVKDRFTISRDDSKNTAYLQMNNLKTEDTAVYYCVRHANFGNSYISYWAYWGQGTLVTVSSGGGGSGGGGSGGGGSQTVVTQEPSLTVSPGGTVTLTCASSTGAVTSGNYPNWVQQKPGQAPRGLIGGTKFLVPGTPARFSGSLLGGKAALTLSGVQPEDEAEYYCTLWYSNRWVFGGGTKLTVLHHHHHH

SEQ ID NO: 3288 - protein, 507 aa, synthetic construct
  REGION 1..507: note = Description of Artificial Sequence: Synthetic polypeptide
EVQLVESGGGLVQPGRSLTLSCAASTNIFSKSPMGWYRQAPGKQRELVAAIHGSSTLYADSVKGRFTISRDNAKNSIYLQMNSLRPEDTALYYCNKVPWGDYHPGNVYWGQGTQVTVSSGGGGSGGGSEVQLVESGGGLVQPGNSLRLSCAASGFTFSKFGMSWVRQAPGKGLEWVSSISGSGRDTLYADSVKGRFTISRDNAKTTLYLQMNSLRPEDTAVYYCTIGGSLSVSSQGTLVTVSSGGGGSGGGSEVQLVESGGGLVQPGGSLKLSCAASGFTFNKYAINWVRQAPGKGLEWVARIRSKYNNYATYYADQVKDRFTISRDDSKNTAYLQMNNLKTEDTAVYYCVRHANFGNSYISYWAYWGQGTLVTVSSGGGGSGGGGSGGGGSQTVVTQEPSLTVSPGGTVTLTCASSTGAVTSGNYPNWVQQKPGQAPRGLIGGTKFLVPGTPARFSGSLLGGKAALTLSGVQPEDEAEYYCTLWYSNRWVFGGGTKLTVLHHHHHH

SEQ ID NO: 3289 - protein, 507 aa, synthetic construct
  REGION 1..507: note = Description of Artificial Sequence: Synthetic polypeptide
EVQLVESGGGLVQPGRSLTLSCAASTNIFSKSPMGWYRQAPGKQRELVAAIHGSSTLYADSVKGRFTISRDNAKNSIYLQMNSLRPEDTALYYCNKVPWGDYHPRNVYWGQGTQVTVSSGGGGSGGGSEVQLVESGGGLVQPGNSLRLSCAASGFTFSKFGMSWVRQAPGKGLEWVSSISGSGRDTLYADSVKGRFTISRDNAKTTLYLQMNSLRPEDTAVYYCTIGGSLSVSSQGTLVTVSSGGGGSGGGSEVQLVESGGGLVQPGGSLKLSCAASGFTFNKYAINWVRQAPGKGLEWVARIRSKYNNYATYYADQVKDRFTISRDDSKNTAYLQMNNLKTEDTAVYYCVRHANFGNSYISYWAYWGQGTLVTVSSGGGGSGGGGSGGGGSQTVVTQEPSLTVSPGGTVTLTCASSTGAVTSGNYPNWVQQKPGQAPRGLIGGTKFLVPGTPARFSGSLLGGKAALTLSGVQPEDEAEYYCTLWYSNRWVFGGGTKLTVLHHHHHH

SEQ ID NO: 3290 - protein, 507 aa, synthetic construct
  REGION 1..507: note = Description of Artificial Sequence: Synthetic polypeptide
EVQLVESGGGLVQPGRSLTLSCAASTNEFSISPMGWYRQAPGKQRELVAAIHGLSTLYADSVKGRFTISRDNAKNSIYLQMNSLRPEDTALYYCNKVPWGAYHPRNVYWGQGTQVTVSSGGGGSGGGSEVQLVESGGGLVQPGNSLRLSCAASGFTFSKFGMSWVRQAPGKGLEWVSSISGSGRDTLYADSVKGRFTISRDNAKTTLYLQMNSLRPEDTAVYYCTIGGSLSVSSQGTLVTVSSGGGGSGGGSEVQLVESGGGLVQPGGSLKLSCAASGFTFNKYAINWVRQAPGKGLEWVARIRSKYNNYATYYADQVKDRFTISRDDSKNTAYLQMNNLKTEDTAVYYCVRHANFGNSYISYWAYWGQGTLVTVSSGGGGSGGGGSGGGGSQTVVTQEPSLTVSPGGTVTLTCASSTGAVTSGNYPNWVQQKPGQAPRGLIGGTKFLVPGTPARFSGSLLGGKAALTLSGVQPEDEAEYYCTLWYSNRWVFGGGTKLTVLHHHHHH

SEQ ID NO: 3291 - protein, 507 aa, synthetic construct
  REGION 1..507: note = Description of Artificial Sequence: Synthetic polypeptide
EVQLVESGGGLVQPGRSLTLSCAASTNEFSISPMGWYRQAPGKQRELVAAIHGESTLYADSVKGRFTISRDNAKNSIYLQMNSLRPEDTALYYCNKVPWGDYHPGNVYWGQGTQVTVSSGGGGSGGGSEVQLVESGGGLVQPGNSLRLSCAASGFTFSKFGMSWVRQAPGKGLEWVSSISGSGRDTLYADSVKGRFTISRDNAKTTLYLQMNSLRPEDTAVYYCTIGGSLSVSSQGTLVTVSSGGGGSGGGSEVQLVESGGGLVQPGGSLKLSCAASGFTFNKYAINWVRQAPGKGLEWVARIRSKYNNYATYYADQVKDRFTISRDDSKNTAYLQMNNLKTEDTAVYYCVRHANFGNSYISYWAYWGQGTLVTVSSGGGGSGGGGSGGGGSQTVVTQEPSLTVSPGGTVTLTCASSTGAVTSGNYPNWVQQKPGQAPRGLIGGTKFLVPGTPARFSGSLLGGKAALTLSGVQPEDEAEYYCTLWYSNRWVFGGGTKLTVLHHHHHH

SEQ ID NO: 3292 - protein, 507 aa, synthetic construct
  REGION 1..507: note = Description of Artificial Sequence: Synthetic polypeptide
EVQLVESGGGLVQPGRSLTLSCAASTNIPSISPMGWYRQAPGKQRELVAAIHGESTLYADSVKGRFTISRDNAKNSIYLQMNSLRPEDTALYYCNKVPWGDYHPRNVAWGQGTQVTVSSGGGGSGGGSEVQLVESGGGLVQPGNSLRLSCAASGFTFSKFGMSWVRQAPGKGLEWVSSISGSGRDTLYADSVKGRFTISRDNAKTTLYLQMNSLRPEDTAVYYCTIGGSLSVSSQGTLVTVSSGGGGSGGGSEVQLVESGGGLVQPGGSLKLSCAASGFTFNKYAINWVRQAPGKGLEWVARIRSKYNNYATYYADQVKDRFTISRDDSKNTAYLQMNNLKTEDTAVYYCVRHANFGNSYISYWAYWGQGTLVTVSSGGGGSGGGGSGGGGSQTVVTQEPSLTVSPGGTVTLTCASSTGAVTSGNYPNWVQQKPGQAPRGLIGGTKFLVPGTPARFSGSLLGGKAALTLSGVQPEDEAEYYCTLWYSNRWVFGGGTKLTVLHHHHHH

SEQ ID NO: 3293 - protein, 507 aa, synthetic construct
  REGION 1..507: note = Description of Artificial Sequence: Synthetic polypeptide
EVQLVESGGGLVQPGRSLTLSCAASTNIPSISPMGWYRQAPGKQRELVAAIHGASTLYADSVKGRFTISRDNAKNSIYLQMNSLRPEDTALYYCNKVPWGDYHPRNVAWGQGTQVTVSSGGGGSGGGSEVQLVESGGGLVQPGNSLRLSCAASGFTFSKFGMSWVRQAPGKGLEWVSSISGSGRDTLYADSVKGRFTISRDNAKTTLYLQMNSLRPEDTAVYYCTIGGSLSVSSQGTLVTVSSGGGGSGGGSEVQLVESGGGLVQPGGSLKLSCAASGFTFNKYAINWVRQAPGKGLEWVARIRSKYNNYATYYADQVKDRFTISRDDSKNTAYLQMNNLKTEDTAVYYCVRHANFGNSYISYWAYWGQGTLVTVSSGGGGSGGGGSGGGGSQTVVTQEPSLTVSPGGTVTLTCASSTGAVTSGNYPNWVQQKPGQAPRGLIGGTKFLVPGTPARFSGSLLGGKAALTLSGVQPEDEAEYYCTLWYSNRWVFGGGTKLTVLHHHHHH

SEQ ID NO: 3294 - protein, 507 aa, synthetic construct
  REGION 1..507: note = Description of Artificial Sequence: Synthetic polypeptide
EVQLVESGGGLVQPGRSLTLSCAASTNIPSISPMGWYRQAPGKQRELVAAIHGESTLYADSVKGRFTISRDNAKNSIYLQMNSLRPEDTALYYCNKVPWGDYHPRNVYWGQGTQVTVSSGGGGSGGGSEVQLVESGGGLVQPGNSLRLSCAASGFTFSKFGMSWVRQAPGKGLEWVSSISGSGRDTLYADSVKGRFTISRDNAKTTLYLQMNSLRPEDTAVYYCTIGGSLSVSSQGTLVTVSSGGGGSGGGSEVQLVESGGGLVQPGGSLKLSCAASGFTFNKYAINWVRQAPGKGLEWVARIRSKYNNYATYYADQVKDRFTISRDDSKNTAYLQMNNLKTEDTAVYYCVRHANFGNSYISYWAYWGQGTLVTVSSGGGGSGGGGSGGGGSQTVVTQEPSLTVSPGGTVTLTCASSTGAVTSGNYPNWVQQKPGQAPRGLIGGTKFLVPGTPARFSGSLLGGKAALTLSGVQPEDEAEYYCTLWYSNRWVFGGGTKLTVLHHHHHH

SEQ ID NO: 3295 - protein, 507 aa, synthetic construct
  REGION 1..507: note = Description of Artificial Sequence: Synthetic polypeptide
EVQLVESGGGLVQPGRSLTLSCAASTNIPSISPMGWYRQAPGKQRELVAAIHGDSTLYADSVKGRFTISRDNAKNSIYLQMNSLRPEDTALYYCNKVPWGDYHPRNVYWGQGTQVTVSSGGGGSGGGSEVQLVESGGGLVQPGNSLRLSCAASGFTFSKFGMSWVRQAPGKGLEWVSSISGSGRDTLYADSVKGRFTISRDNAKTTLYLQMNSLRPEDTAVYYCTIGGSLSVSSQGTLVTVSSGGGGSGGGSEVQLVESGGGLVQPGGSLKLSCAASGFTFNKYAINWVRQAPGKGLEWVARIRSKYNNYATYYADQVKDRFTISRDDSKNTAYLQMNNLKTEDTAVYYCVRHANFGNSYISYWAYWGQGTLVTVSSGGGGSGGGGSGGGGSQTVVTQEPSLTVSPGGTVTLTCASSTGAVTSGNYPNWVQQKPGQAPRGLIGGTKFLVPGTPARFSGSLLGGKAALTLSGVQPEDEAEYYCTLWYSNRWVFGGGTKLTVLHHHHHH

SEQ ID NO: 3296 - protein, 507 aa, synthetic construct
  REGION 1..507: note = Description of Artificial Sequence: Synthetic polypeptide
EVQLVESGGGLVQPGRSLTLSCAASTNITSISPMGWYRQAPGKQRELVAAIHGVSTLYADSVKGRFTISRDNAKNSIYLQMNSLRPEDTALYYCNKVPWGDYHPRNVQWGQGTQVTVSSGGGGSGGGSEVQLVESGGGLVQPGNSLRLSCAASGFTFSKFGMSWVRQAPGKGLEWVSSISGSGRDTLYADSVKGRFTISRDNAKTTLYLQMNSLRPEDTAVYYCTIGGSLSVSSQGTLVTVSSGGGGSGGGSEVQLVESGGGLVQPGGSLKLSCAASGFTFNKYAINWVRQAPGKGLEWVARIRSKYNNYATYYADQVKDRFTISRDDSKNTAYLQMNNLKTEDTAVYYCVRHANFGNSYISYWAYWGQGTLVTVSSGGGGSGGGGSGGGGSQTVVTQEPSLTVSPGGTVTLTCASSTGAVTSGNYPNWVQQKPGQAPRGLIGGTKFLVPGTPARFSGSLLGGKAALTLSGVQPEDEAEYYCTLWYSNRWVFGGGTKLTVLHHHHHH

SEQ ID NO: 3297 - protein, 507 aa, synthetic construct
  REGION 1..507: note = Description of Artificial Sequence: Synthetic polypeptide
EVQLVESGGGLVQPGRSLTLSCAASTNIPSISPMGWYRQAPGKQRELVAAIHGQSTLYADSVKGRFTISRDNAKNSIYLQMNSLRPEDTALYYCNKVPWGDYHPRNVQWGQGTQVTVSSGGGGSGGGSEVQLVESGGGLVQPGNSLRLSCAASGFTFSKFGMSWVRQAPGKGLEWVSSISGSGRDTLYADSVKGRFTISRDNAKTTLYLQMNSLRPEDTAVYYCTIGGSLSVSSQGTLVTVSSGGGGSGGGSEVQLVESGGGLVQPGGSLKLSCAASGFTFNKYAINWVRQAPGKGLEWVARIRSKYNNYATYYADQVKDRFTISRDDSKNTAYLQMNNLKTEDTAVYYCVRHANFGNSYISYWAYWGQGTLVTVSSGGGGSGGGGSGGGGSQTVVTQEPSLTVSPGGTVTLTCASSTGAVTSGNYPNWVQQKPGQAPRGLIGGTKFLVPGTPARFSGSLLGGKAALTLSGVQPEDEAEYYCTLWYSNRWVFGGGTKLTVLHHHHHH

SEQ ID NO: 3298 - protein, 507 aa, synthetic construct
  REGION 1..507: note = Description of Artificial Sequence: Synthetic polypeptide
EVQLVESGGGLVQPGRSLTLSCAASTNIVSISPMGWYRQAPGKQRELVAAIHGDSTLYADSVKGRFTISRDNAKNSIYLQMNSLRPEDTALYYCNKVPWGDYHPRNVSWGQGTQVTVSSGGGGSGGGSEVQLVESGGGLVQPGNSLRLSCAASGFTFSKFGMSWVRQAPGKGLEWVSSISGSGRDTLYADSVKGRFTISRDNAKTTLYLQMNSLRPEDTAVYYCTIGGSLSVSSQGTLVTVSSGGGGSGGGSEVQLVESGGGLVQPGGSLKLSCAASGFTFNKYAINWVRQAPGKGLEWVARIRSKYNNYATYYADQVKDRFTISRDDSKNTAYLQMNNLKTEDTAVYYCVRHANFGNSYISYWAYWGQGTLVTVSSGGGGSGGGGSGGGGSQTVVTQEPSLTVSPGGTVTLTCASSTGAVTSGNYPNWVQQKPGQAPRGLIGGTKFLVPGTPARFSGSLLGGKAALTLSGVQPEDEAEYYCTLWYSNRWVFGGGTKLTVLHHHHHH

SEQ ID NO: 3299 - protein, 507 aa, synthetic construct; identical to SEQ ID NO: 3298
  REGION 1..507: note = Description of Artificial Sequence: Synthetic polypeptide

SEQ ID NO: 3300 - protein, 507 aa, synthetic construct
  REGION 1..507: note = Description of Artificial Sequence: Synthetic polypeptide
EVQLVESGGGLVQPGRSLTLSCAASSNIFSISPMGWYRQAPGKQRELVAAIHGESTLYADSVKGRFTISRDNAKNSIYLQMNSLRPEDTALYYCNKVPWGDYHPRNVTWGQGTQVTVSSGGGGSGGGSEVQLVESGGGLVQPGNSLRLSCAASGFTFSKFGMSWVRQAPGKGLEWVSSISGSGRDTLYADSVKGRFTISRDNAKTTLYLQMNSLRPEDTAVYYCTIGGSLSVSSQGTLVTVSSGGGGSGGGSEVQLVESGGGLVQPGGSLKLSCAASGFTFNKYAINWVRQAPGKGLEWVARIRSKYNNYATYYADQVKDRFTISRDDSKNTAYLQMNNLKTEDTAVYYCVRHANFGNSYISYWAYWGQGTLVTVSSGGGGSGGGGSGGGGSQTVVTQEPSLTVSPGGTVTLTCASSTGAVTSGNYPNWVQQKPGQAPRGLIGGTKFLVPGTPARFSGSLLGGKAALTLSGVQPEDEAEYYCTLWYSNRWVFGGGTKLTVLHHHHHH

SEQ ID NO: 3301 - protein, 507 aa, synthetic construct
  REGION 1..507: note = Description of Artificial Sequence: Synthetic polypeptide
EVQLVESGGGLVQPGRSLTLSCAASTNIDSISPMGWYRQAPGKQRELVAAIHGESTLYADSVKGRFTISRDNAKNSIYLQMNSLRPEDTALYYCNKVPWGDYHPRNVTWGQGTQVTVSSGGGGSGGGSEVQLVESGGGLVQPGNSLRLSCAASGFTFSKFGMSWVRQAPGKGLEWVSSISGSGRDTLYADSVKGRFTISRDNAKTTLYLQMNSLRPEDTAVYYCTIGGSLSVSSQGTLVTVSSGGGGSGGGSEVQLVESGGGLVQPGGSLKLSCAASGFTFNKYAINWVRQAPGKGLEWVARIRSKYNNYATYYADQVKDRFTISRDDSKNTAYLQMNNLKTEDTAVYYCVRHANFGNSYISYWAYWGQGTLVTVSSGGGGSGGGGSGGGGSQTVVTQEPSLTVSPGGTVTLTCASSTGAVTSGNYPNWVQQKPGQAPRGLIGGTKFLVPGTPARFSGSLLGGKAALTLSGVQPEDEAEYYCTLWYSNRWVFGGGTKLTVLHHHHHH

SEQ ID NO: 3302 - protein, 507 aa, synthetic construct
  REGION 1..507: note = Description of Artificial Sequence: Synthetic polypeptide
EVQLVESGGGLVQPGRSLTLSCAASTNIDSISPMGWYRQAPGKQRELVAAIHGSSTLYADSVKGRFTISRDNAKNSIYLQMNSLRPEDTALYYCNKVPWGDYHPRNVTWGQGTQVTVSSGGGGSGGGSEVQLVESGGGLVQPGNSLRLSCAASGFTFSKFGMSWVRQAPGKGLEWVSSISGSGRDTLYADSVKGRFTISRDNAKTTLYLQMNSLRPEDTAVYYCTIGGSLSVSSQGTLVTVSSGGGGSGGGSEVQLVESGGGLVQPGGSLKLSCAASGFTFNKYAINWVRQAPGKGLEWVARIRSKYNNYATYYADQVKDRFTISRDDSKNTAYLQMNNLKTEDTAVYYCVRHANFGNSYISYWAYWGQGTLVTVSSGGGGSGGGGSGGGGSQTVVTQEPSLTVSPGGTVTLTCASSTGAVTSGNYPNWVQQKPGQAPRGLIGGTKFLVPGTPARFSGSLLGGKAALTLSGVQPEDEAEYYCTLWYSNRWVFGGGTKLTVLHHHHHH

SEQ ID NO: 3303 - protein, 507 aa, synthetic construct
  REGION 1..507: note = Description of Artificial Sequence: Synthetic polypeptide
EVQLVESGGGLVQPGRSLTLSCAASTNIRSISPMGWYRQAPGKQRELVAAIHGSSTLYADSVKGRFTISRDNAKNSIYLQMNSLRPEDTALYYCNKVPWGDYHPRNVVWGQGTQVTVSSGGGGSGGGSEVQLVESGGGLVQPGNSLRLSCAASGFTFSKFGMSWVRQAPGKGLEWVSSISGSGRDTLYADSVKGRFTISRDNAKTTLYLQMNSLRPEDTAVYYCTIGGSLSVSSQGTLVTVSSGGGGSGGGSEVQLVESGGGLVQPGGSLKLSCAASGFTFNKYAINWVRQAPGKGLEWVARIRSKYNNYATYYADQVKDRFTISRDDSKNTAYLQMNNLKTEDTAVYYCVRHANFGNSYISYWAYWGQGTLVTVSSGGGGSGGGGSGGGGSQTVVTQEPSLTVSPGGTVTLTCASSTGAVTSGNYPNWVQQKPGQAPRGLIGGTKFLVPGTPARFSGSLLGGKAALTLSGVQPEDEAEYYCTLWYSNRWVFGGGTKLTVLHHHHHH

SEQ ID NO: 3304 - protein, 507 aa, synthetic construct
  REGION 1..507: note = Description of Artificial Sequence: Synthetic polypeptide
EVQLVESGGGLVQPGRSLTLSCAASTNITSISPMGWYRQAPGKQRELVAAISGFSTLYADSVKGRFTISRDNAKNSIYLQMNSLRPEDTALYYCNEVPWGDYHPRNVYWGQGTQVTVSSGGGGSGGGSEVQLVESGGGLVQPGNSLRLSCAASGFTFSKFGMSWVRQAPGKGLEWVSSISGSGRDTLYADSVKGRFTISRDNAKTTLYLQMNSLRPEDTAVYYCTIGGSLSVSSQGTLVTVSSGGGGSGGGSEVQLVESGGGLVQPGGSLKLSCAASGFTFNKYAINWVRQAPGKGLEWVARIRSKYNNYATYYADQVKDRFTISRDDSKNTAYLQMNNLKTEDTAVYYCVRHANFGNSYISYWAYWGQGTLVTVSSGGGGSGGGGSGGGGSQTVVTQEPSLTVSPGGTVTLTCASSTGAVTSGNYPNWVQQKPGQAPRGLIGGTKFLVPGTPARFSGSLLGGKAALTLSGVQPEDEAEYYCTLWYSNRWVFGGGTKLTVLHHHHHH

SEQ ID NO: 3305 - protein, 507 aa, synthetic construct
  REGION 1..507: note = Description of Artificial Sequence: Synthetic polypeptide
EVQLVESGGGLVQPGRSLTLSCAASTNITSISPMGWYRQAPGKQRELVAAIHGESTLYADSVKGRFTISRDNAKNSIYLQMNSLRPEDTALYYCNKVPWGDYHPRNVYWGQGTQVTVSSGGGGSGGGSEVQLVESGGGLVQPGNSLRLSCAASGFTFSKFGMSWVRQAPGKGLEWVSSISGSGRDTLYADSVKGRFTISRDNAKTTLYLQMNSLRPEDTAVYYCTIGGSLSVSSQGTLVTVSSGGGGSGGGSEVQLVESGGGLVQPGGSLKLSCAASGFTFNKYAINWVRQAPGKGLEWVARIRSKYNNYATYYADQVKDRFTISRDDSKNTAYLQMNNLKTEDTAVYYCVRHANFGNSYISYWAYWGQGTLVTVSSGGGGSGGGGSGGGGSQTVVTQEPSLTVSPGGTVTLTCASSTGAVTSGNYPNWVQQKPGQAPRGLIGGTKFLVPGTPARFSGSLLGGKAALTLSGVQPEDEAEYYCTLWYSNRWVFGGGTKLTVLHHHHHH

SEQ ID NO: 3306 - protein, 507 aa, synthetic construct
  REGION 1..507: note = Description of Artificial Sequence: Synthetic polypeptide
EVQLVESGGGLVQPGRSLTLSCAASTNITSVSPMGWYRQAPGKQRELVAAIHGPSTLYADSVKGRFTISRDNAKNSIYLQMNSLRPEDTALYYCNKVPWGDYHPTNVYWGQGTQVTVSSGGGGSGGGSEVQLVESGGGLVQPGNSLRLSCAASGFTFSKFGMSWVRQAPGKGLEWVSSISGSGRDTLYADSVKGRFTISRDNAKTTLYLQMNSLRPEDTAVYYCTIGGSLSVSSQGTLVTVSSGGGGSGGGSEVQLVESGGGLVQPGGSLKLSCAASGFTFNKYAINWVRQAPGKGLEWVARIRSKYNNYATYYADQVKDRFTISRDDSKNTAYLQMNNLKTEDTAVYYCVRHANFGNSYISYWAYWGQGTLVTVSSGGGGSGGGGSGGGGSQTVVTQEPSLTVSPGGTVTLTCASSTGAVTSGNYPNWVQQKPGQAPRGLIGGTKFLVPGTPARFSGSLLGGKAALTLSGVQPEDEAEYYCTLWYSNRWVFGGGTKLTVLHHHHHH

SEQ ID NO: 3307 - protein, 507 aa, synthetic construct
  REGION 1..507: note = Description of Artificial Sequence: Synthetic polypeptide
EVQLVESGGGLVQPGRSLTLSCAASTNIGSISPMGWYRQAPGKQRELVAAIHGQSTLYADSVKGRFTISRDNAKNSIYLQMNSLRPEDTALYYCNKVPWGDYHPQNVYWGQGTQVTVSSGGGGSGGGSEVQLVESGGGLVQPGNSLRLSCAASGFTFSKFGMSWVRQAPGKGLEWVSSISGSGRDTLYADSVKGRFTISRDNAKTTLYLQMNSLRPEDTAVYYCTIGGSLSVSSQGTLVTVSSGGGGSGGGSEVQLVESGGGLVQPGGSLKLSCAASGFTFNKYAINWVRQAPGKGLEWVARIRSKYNNYATYYADQVKDRFTISRDDSKNTAYLQMNNLKTEDTAVYYCVRHANFGNSYISYWAYWGQGTLVTVSSGGGGSGGGGSGGGGSQTVVTQEPSLTVSPGGTVTLTCASSTGAVTSGNYPNWVQQKPGQAPRGLIGGTKFLVPGTPARFSGSLLGGKAALTLSGVQPEDEAEYYCTLWYSNRWVFGGGTKLTVLHHHHHH

SEQ ID NO: 3308 - protein, 507 aa, synthetic construct
  REGION 1..507: note = Description of Artificial Sequence: Synthetic polypeptide
EVQLVESGGGLVQPGRSLTLSCAASTNIESISPMGWYRQAPGKQRELVAAIHGKSTLYADSVKGRFTISRDNAKNSIYLQMNSLRPEDTALYYCNKVPWGDYHPRRVYWGQGTQVTVSSGGGGSGGGSEVQLVESGGGLVQPGNSLRLSCAASGFTFSKFGMSWVRQAPGKGLEWVSSISGSGRDTLYADSVKGRFTISRDNAKTTLYLQMNSLRPEDTAVYYCTIGGSLSVSSQGTLVTVSSGGGGSGGGSEVQLVESGGGLVQPGGSLKLSCAASGFTFNKYAINWVRQAPGKGLEWVARIRSKYNNYATYYADQVKDRFTISRDDSKNTAYLQMNNLKTEDTAVYYCVRHANFGNSYISYWAYWGQGTLVTVSSGGGGSGGGGSGGGGSQTVVTQEPSLTVSPGGTVTLTCASSTGAVTSGNYPNWVQQKPGQAPRGLIGGTKFLVPGTPARFSGSLLGGKAALTLSGVQPEDEAEYYCTLWYSNRWVFGGGTKLTVLHHHHHH

SEQ ID NO: 3309 - protein, 507 aa, synthetic construct
  REGION 1..507: note = Description of Artificial Sequence: Synthetic polypeptide
EVQLVESGGGLVQPGRSLTLSCAASTNIVSISPMGWYRQAPGKQRELVAAIHGDSTLYADSVKGRFTISRDNAKNSIYLQMNSLRPEDTALYYCNKVPWGDYHPRRVYWGQGTQVTVSSGGGGSGGGSEVQLVESGGGLVQPGNSLRLSCAASGFTFSKFGMSWVRQAPGKGLEWVSSISGSGRDTLYADSVKGRFTISRDNAKTTLYLQMNSLRPEDTAVYYCTIGGSLSVSSQGTLVTVSSGGGGSGGGSEVQLVESGGGLVQPGGSLKLSCAASGFTFNKYAINWVRQAPGKGLEWVARIRSKYNNYATYYADQVKDRFTISRDDSKNTAYLQMNNLKTEDTAVYYCVRHANFGNSYISYWAYWGQGTLVTVSSGGGGSGGGGSGGGGSQTVVTQEPSLTVSPGGTVTLTCASSTGAVTSGNYPNWVQQKPGQAPRGLIGGTKFLVPGTPARFSGSLLGGKAALTLSGVQPEDEAEYYCTLWYSNRWVFGGGTKLTVLHHHHHH

SEQ ID NO: 3310 - protein, 507 aa, synthetic construct
  REGION 1..507: note = Description of Artificial Sequence: Synthetic polypeptide
EVQLVESGGGLVQPGRSLTLSCAASTNIDSISPMGWYRQAPGKQRELVAAIHGNSTLYADSVKGRFTISRDNAKNSIYLQMNSLRPEDTALYYCNKVPWGDYHPRMVYWGQGTQVTVSSGGGGSGGGSEVQLVESGGGLVQPGNSLRLSCAASGFTFSKFGMSWVRQAPGKGLEWVSSISGSGRDTLYADSVKGRFTISRDNAKTTLYLQMNSLRPEDTAVYYCTIGGSLSVSSQGTLVTVSSGGGGSGGGSEVQLVESGGGLVQPGGSLKLSCAASGFTFNKYAINWVRQAPGKGLEWVARIRSKYNNYATYYADQVKDRFTISRDDSKNTAYLQMNNLKTEDTAVYYCVRHANFGNSYISYWAYWGQGTLVTVSSGGGGSGGGGSGGGGSQTVVTQEPSLTVSPGGTVTLTCASSTGAVTSGNYPNWVQQKPGQAPRGLIGGTKFLVPGTPARFSGSLLGGKAALTLSGVQPEDEAEYYCTLWYSNRWVFGGGTKLTVLHHHHHH

SEQ ID NO: 3311 - protein, 507 aa, synthetic construct
  REGION 1..507: note = Description of Artificial Sequence: Synthetic polypeptide
EVQLVESGGGLVQPGRSLTLSCAASTNIFMISPMGWYRQAPGKQRELVAAIHGDSTLYADSVKGRFTISRDNAKNSIYLQMNSLRPEDTALYYCNKVPWGRYHPRNVYWGQGTQVTVSSGGGGSGGGSEVQLVESGGGLVQPGNSLRLSCAASGFTFSKFGMSWVRQAPGKGLEWVSSISGSGRDTLYADSVKGRFTISRDNAKTTLYLQMNSLRPEDTAVYYCTIGGSLSVSSQGTLVTVSSGGGGSGGGSEVQLVESGGGLVQPGGSLKLSCAASGFTFNKYAINWVRQAPGKGLEWVARIRSKYNNYATYYADQVKDRFTISRDDSKNTAYLQMNNLKTEDTAVYYCVRHANFGNSYISYWAYWGQGTLVTVSSGGGGSGGGGSGGGGSQTVVTQEPSLTVSPGGTVTLTCASSTGAVTSGNYPNWVQQKPGQAPRGLIGGTKFLVPGTPARFSGSLLGGKAALTLSGVQPEDEAEYYCTLWYSNRWVFGGGTKLTVLHHHHHH

SEQ ID NO: 3312 - protein, 507 aa, synthetic construct
  REGION 1..507: note = Description of Artificial Sequence: Synthetic polypeptide
EVQLVESGGGLVQPGRSLTLSCAASTNIFRISPMGWYRQAPGKQRELVAAIHGDSTLYADSVKGRFTISRDNAKNSIYLQMNSLRPEDTALYYCNKVPWGRYHPRNVYWGQGTQVTVSSGGGGSGGGSEVQLVESGGGLVQPGNSLRLSCAASGFTFSKFGMSWVRQAPGKGLEWVSSISGSGRDTLYADSVKGRFTISRDNAKTTLYLQMNSLRPEDTAVYYCTIGGSLSVSSQGTLVTVSSGGGGSGGGSEVQLVESGGGLVQPGGSLKLSCAASGFTFNKYAINWVRQAPGKGLEWVARIRSKYNNYATYYADQVKDRFTISRDDSKNTAYLQMNNLKTEDTAVYYCVRHANFGNSYISYWAYWGQGTLVTVSSGGGGSGGGGSGGGGSQTVVTQEPSLTVSPGGTVTLTCASSTGAVTSGNYPNWVQQKPGQAPRGLIGGTKFLVPGTPARFSGSLLGGKAALTLSGVQPEDEAEYYCTLWYSNRWVFGGGTKLTVLHHHHHH

SEQ ID NO: 3313 - protein, 507 aa, synthetic construct
  REGION 1..507: note = Description of Artificial Sequence: Synthetic polypeptide
EVQLVESGGGLVQPGRSLTLSCAASTNIFSISPMGWYRQAPGKQRELVAAIHGDSTLYADSVKGRFTISRDNAKNSIYLQMNSLRPEDTALYYCNKVPWGEYHPRNVYWGQGTQVTVSSGGGGSGGGSEVQLVESGGGLVQPGNSLRLSCAASGFTFSKFGMSWVRQAPGKGLEWVSSISGSGRDTLYADSVKGRFTISRDNAKTTLYLQMNSLRPEDTAVYYCTIGGSLSVSSQGTLVTVSSGGGGSGGGSEVQLVESGGGLVQPGGSLKLSCAASGFTFNKYAINWVRQAPGKGLEWVARIRSKYNNYATYYADQVKDRFTISRDDSKNTAYLQMNNLKTEDTAVYYCVRHANFGNSYISYWAYWGQGTLVTVSSGGGGSGGGGSGGGGSQTVVTQEPSLTVSPGGTVTLTCASSTGAVTSGNYPNWVQQKPGQAPRGLIGGTKFLVPGTPARFSGSLLGGKAALTLSGVQPEDEAEYYCTLWYSNRWVFGGGTKLTVLHHHHHH

SEQ ID NO: 3314 - protein, 507 aa, synthetic construct
  REGION 1..507: note = Description of Artificial Sequence: Synthetic polypeptide
EVQLVESGGGLVQPGRSLTLSCAASTNIFSISPMGWYRQAPGKQRELVAAIHGDSTLYADSVKGRFTISRDNAKNSIYLQMNSLRPEDTALYYCNKVPWGKYHPRNVYWGQGTQVTVSSGGGGSGGGSEVQLVESGGGLVQPGNSLRLSCAASGFTFSKFGMSWVRQAPGKGLEWVSSISGSGRDTLYADSVKGRFTISRDNAKTTLYLQMNSLRPEDTAVYYCTIGGSLSVSSQGTLVTVSSGGGGSGGGSEVQLVESGGGLVQPGGSLKLSCAASGFTFNKYAINWVRQAPGKGLEWVARIRSKYNNYATYYADQVKDRFTISRDDSKNTAYLQMNNLKTEDTAVYYCVRHANFGNSYISYWAYWGQGTLVTVSSGGGGSGGGGSGGGGSQTVVTQEPSLTVSPGGTVTLTCASSTGAVTSGNYPNWVQQKPGQAPRGLIGGTKFLVPGTPARFSGSLLGGKAALTLSGVQPEDEAEYYCTLWYSNRWVFGGGTKLTVLHHHHHH

SEQ ID NO: 3315 - protein, 507 aa, synthetic construct
  REGION 1..507: note = Description of Artificial Sequence: Synthetic polypeptide
EVQLVESGGGLVQPGRSLTLSCAASTNIESISPMGWYRQAPGKQRELVAAIHGSSTLYADSVKGRFTISRDNAKNSIYLQMNSLRPEDTALYYCNKVPWGRYHPRNVYWGQGTQVTVSSGGGGSGGGSEVQLVESGGGLVQPGNSLRLSCAASGFTFSKFGMSWVRQAPGKGLEWVSSISGSGRDTLYADSVKGRFTISRDNAKTTLYLQMNSLRPEDTAVYYCTIGGSLSVSSQGTLVTVSSGGGGSGGGSEVQLVESGGGLVQPGGSLKLSCAASGFTFNKYAINWVRQAPGKGLEWVARIRSKYNNYATYYADQVKDRFTISRDDSKNTAYLQMNNLKTEDTAVYYCVRHANFGNSYISYWAYWGQGTLVTVSSGGGGSGGGGSGGGGSQTVVTQEPSLTVSPGGTVTLTCASSTGAVTSGNYPNWVQQKPGQAPRGLIGGTKFLVPGTPARFSGSLLGGKAALTLSGVQPEDEAEYYCTLWYSNRWVFGGGTKLTVLHHHHHH

SEQ ID NO: 3316 - protein, 507 aa, synthetic construct
  REGION 1..507: note = Description of Artificial Sequence: Synthetic polypeptide
EVQLVESGGGLVQPGRSLTLSCAASTNIESISPMGWYRQAPGKQRELVAAIHGNSTLYADSVKGRFTISRDNAKNSIYLQMNSLRPEDTALYYCNKVPWGRYHPRNVYWGQGTQVTVSSGGGGSGGGSEVQLVESGGGLVQPGNSLRLSCAASGFTFSKFGMSWVRQAPGKGLEWVSSISGSGRDTLYADSVKGRFTISRDNAKTTLYLQMNSLRPEDTAVYYCTIGGSLSVSSQGTLVTVSSGGGGSGGGSEVQLVESGGGLVQPGGSLKLSCAASGFTFNKYAINWVRQAPGKGLEWVARIRSKYNNYATYYADQVKDRFTISRDDSKNTAYLQMNNLKTEDTAVYYCVRHANFGNSYISYWAYWGQGTLVTVSSGGGGSGGGGSGGGGSQTVVTQEPSLTVSPGGTVTLTCASSTGAVTSGNYPNWVQQKPGQAPRGLIGGTKFLVPGTPARFSGSLLGGKAALTLSGVQPEDEAEYYCTLWYSNRWVFGGGTKLTVLHHHHHH

SEQ ID NO: 3317 - protein, 507 aa, synthetic construct
  REGION 1..507: note = Description of Artificial Sequence: Synthetic polypeptide
EVQLVESGGGLVQPGRSLTLSCAASTNISSISPMGWYRQAPGKQRELVAAIHGFSTLYADSVKGRFTISRDNAKNSIYLQMNSLRPEDTALYYCNKVPWGYYHPRNVYWGQGTQVTVSSGGGGSGGGSEVQLVESGGGLVQPGNSLRLSCAASGFTFSKFGMSWVRQAPGKGLEWVSSISGSGRDTLYADSVKGRFTISRDNAKTTLYLQMNSLRPEDTAVYYCTIGGSLSVSSQGTLVTVSSGGGGSGGGSEVQLVESGGGLVQPGGSLKLSCAASGFTFNKYAINWVRQAPGKGLEWVARIRSKYNNYATYYADQVKDRFTISRDDSKNTAYLQMNNLKTEDTAVYYCVRHANFGNSYISYWAYWGQGTLVTVSSGGGGSGGGGSGGGGSQTVVTQEPSLTVSPGGTVTLTCASSTGAVTSGNYPNWVQQKPGQAPRGLIGGTKFLVPGTPARFSGSLLGGKAALTLSGVQPEDEAEYYCTLWYSNRWVFGGGTKLTVLHHHHHH

SEQ ID NO: 3318 - protein, 507 aa, synthetic construct
  REGION 1..507: note = Description of Artificial Sequence: Synthetic polypeptide
EVQLVESGGGLVQPGRSLTLSCAASTNISSISPMGWYRQAPGKQRELVAAIHGHSTLYADSVKGRFTISRDNAKNSIYLQMNSLRPEDTALYYCNKVPWGRYHPRNVYWGQGTQVTVSSGGGGSGGGSEVQLVESGGGLVQPGNSLRLSCAASGFTFSKFGMSWVRQAPGKGLEWVSSISGSGRDTLYADSVKGRFTISRDNAKTTLYLQMNSLRPEDTAVYYCTIGGSLSVSSQGTLVTVSSGGGGSGGGSEVQLVESGGGLVQPGGSLKLSCAASGFTFNKYAINWVRQAPGKGLEWVARIRSKYNNYATYYADQVKDRFTISRDDSKNTAYLQMNNLKTEDTAVYYCVRHANFGNSYISYWAYWGQGTLVTVSSGGGGSGGGGSGGGGSQTVVTQEPSLTVSPGGTVTLTCASSTGAVTSGNYPNWVQQKPGQAPRGLIGGTKFLVPGTPARFSGSLLGGKAALTLSGVQPEDEAEYYCTLWYSNRWVFGGGTKLTVLHHHHHH

SEQ ID NO: 3319 - protein, 507 aa, synthetic construct
  REGION 1..507: note = Description of Artificial Sequence: Synthetic polypeptide
EVQLVESGGGLVQPGRSLTLSCAASTNISSISPMGWYRQAPGKQRELVAAIHGFSTVYADSVKGRFTISRDNAKNSIYLQMNSLRPEDTALYYCNKVPWGRYHPRNVYWGQGTQVTVSSGGGGSGGGSEVQLVESGGGLVQPGNSLRLSCAASGFTFSKFGMSWVRQAPGKGLEWVSSISGSGRDTLYADSVKGRFTISRDNAKTTLYLQMNSLRPEDTAVYYCTIGGSLSVSSQGTLVTVSSGGGGSGGGSEVQLVESGGGLVQPGGSLKLSCAASGFTFNKYAINWVRQAPGKGLEWVARIRSKYNNYATYYADQVKDRFTISRDDSKNTAYLQMNNLKTEDTAVYYCVRHANFGNSYISYWAYWGQGTLVTVSSGGGGSGGGGSGGGGSQTVVTQEPSLTVSPGGTVTLTCASSTGAVTSGNYPNWVQQKPGQAPRGLIGGTKFLVPGTPARFSGSLLGGKAALTLSGVQPEDEAEYYCTLWYSNRWVFGGGTKLTVLHHHHHH

SEQ ID NO: 3320 - protein, 507 aa, synthetic construct
  REGION 1..507: note = Description of Artificial Sequence: Synthetic polypeptide
EVQLVESGGGLVQPGRSLTLSCAASTNIFSIRPMGWYRQAPGKQRELVAAIHGFSTVYADSVKGRFTISRDNAKNSIYLQMNSLRPEDTALYYCNKVPWGDYHPRNVYWGQGTQVTVSSGGGGSGGGSEVQLVESGGGLVQPGNSLRLSCAASGFTFSKFGMSWVRQAPGKGLEWVSSISGSGRDTLYADSVKGRFTISRDNAKTTLYLQMNSLRPEDTAVYYCTIGGSLSVSSQGTLVTVSSGGGGSGGGSEVQLVESGGGLVQPGGSLKLSCAASGFTFNKYAINWVRQAPGKGLEWVARIRSKYNNYATYYADQVKDRFTISRDDSKNTAYLQMNNLKTEDTAVYYCVRHANFGNSYISYWAYWGQGTLVTVSSGGGGSGGGGSGGGGSQTVVTQEPSLTVSPGGTVTLTCASSTGAVTSGNYPNWVQQKPGQAPRGLIGGTKFLVPGTPARFSGSLLGGKAALTLSGVQPEDEAEYYCTLWYSNRWVFGGGTKLTVLHHHHHH

SEQ ID NO: 3321 - protein, 507 aa, synthetic construct
  REGION 1..507: note = Description of Artificial Sequence: Synthetic polypeptide
EVQLVESGGGLVQPGRSLTLSCAASTNIFSIYPMGWYRQAPGKQRELVAAIHGFSTYYADSVKGRFTISRDNAKNSIYLQMNSLRPEDTALYYCNKVPWGSYHPRNVYWGQGTQVTVSSGGGGSGGGSEVQLVESGGGLVQPGNSLRLSCAASGFTFSKFGMSWVRQAPGKGLEWVSSISGSGRDTLYADSVKGRFTISRDNAKTTLYLQMNSLRPEDTAVYYCTIGGSLSVSSQGTLVTVSSGGGGSGGGSEVQLVESGGGLVQPGGSLKLSCAASGFTFNKYAINWVRQAPGKGLEWVARIRSKYNNYATYYADQVKDRFTISRDDSKNTAYLQMNNLKTEDTAVYYCVRHANFGNSYISYWAYWGQGTLVTVSSGGGGSGGGGSGGGGSQTVVTQEPSLTVSPGGTVTLTCASSTGAVTSGNYPNWVQQKPGQAPRGLIGGTKFLVPGTPARFSGSLLGGKAALTLSGVQPEDEAEYYCTLWYSNRWVFGGGTKLTVLHHHHHH

SEQ ID NO: 3322 - protein, 507 aa, synthetic construct
  REGION 1..507: note = Description of Artificial Sequence: Synthetic polypeptide
EVQLVESGGGLVQPGRSLTLSCAASTNIFNISPMGWYRQAPGKQRELVAAIHGFSTYYADSVKGRFTISRDNAKNSIYLQMNSLRPEDTALYYCNKVPWGRYHPRNVYWGQGTQVTVSSGGGGSGGGSEVQLVESGGGLVQPGNSLRLSCAASGFTFSKFGMSWVRQAPGKGLEWVSSISGSGRDTLYADSVKGRFTISRDNAKTTLYLQMNSLRPEDTAVYYCTIGGSLSVSSQGTLVTVSSGGGGSGGGSEVQLVESGGGLVQPGGSLKLSCAASGFTFNKYAINWVRQAPGKGLEWVARIRSKYNNYATYYADQVKDRFTISRDDSKNTAYLQMNNLKTEDTAVYYCVRHANFGNSYISYWAYWGQGTLVTVSSGGGGSGGGGSGGGGSQTVVTQEPSLTVSPGGTVTLTCASSTGAVTSGNYPNWVQQKPGQAPRGLIGGTKFLVPGTPARFSGSLLGGKAALTLSGVQPEDEAEYYCTLWYSNRWVFGGGTKLTVLHHHHHH

SEQ ID NO: 3323 - protein, 507 aa, synthetic construct
  REGION 1..507: note = Description of Artificial Sequence: Synthetic polypeptide
EVQLVESGGGLVQPGRSLTLSCAASTNIFSSSPMGWYRQAPGKQRELVAAIHGFSTWYADSVKGRFTISRDNAKNSIYLQMNSLRPEDTALYYCNKVPWGRYHPRNVYWGQGTQVTVSSGGGGSGGGSEVQLVESGGGLVQPGNSLRLSCAASGFTFSKFGMSWVRQAPGKGLEWVSSISGSGRDTLYADSVKGRFTISRDNAKTTLYLQMNSLRPEDTAVYYCTIGGSLSVSSQGTLVTVSSGGGGSGGGSEVQLVESGGGLVQPGGSLKLSCAASGFTFNKYAINWVRQAPGKGLEWVARIRSKYNNYATYYADQVKDRFTISRDDSKNTAYLQMNNLKTEDTAVYYCVRHANFGNSYISYWAYWGQGTLVTVSSGGGGSGGGGSGGGGSQTVVTQEPSLTVSPGGTVTLTCASSTGAVTSGNYPNWVQQKPGQAPRGLIGGTKFLVPGTPARFSGSLLGGKAALTLSGVQPEDEAEYYCTLWYSNRWVFGGGTKLTVLHHHHHH

SEQ ID NO: 3324 - protein, 507 aa, synthetic construct
  REGION 1..507: note = Description of Artificial Sequence: Synthetic polypeptide
EVQLVESGGGLVQPGRSLTLSCAASTNISSISPMGWYRQAPGKQRELVAAIHGFDTLYADSVKGRFTISRDNAKNSIYLQMNSLRPEDTALYYCNKVPWGDYHPRNVYWGQGTQVTVSSGGGGSGGGSEVQLVESGGGLVQPGNSLRLSCAASGFTFSKFGMSWVRQAPGKGLEWVSSISGSGRDTLYADSVKGRFTISRDNAKTTLYLQMNSLRPEDTAVYYCTIGGSLSVSSQGTLVTVSSGGGGSGGGSEVQLVESGGGLVQPGGSLKLSCAASGFTFNKYAINWVRQAPGKGLEWVARIRSKYNNYATYYADQVKDRFTISRDDSKNTAYLQMNNLKTEDTAVYYCVRHANFGNSYISYWAYWGQGTLVTVSSGGGGSGGGGSGGGGSQTVVTQEPSLTVSPGGTVTLTCASSTGAVTSGNYPNWVQQKPGQAPRGLIGGTKFLVPGTPARFSGSLLGGKAALTLSGVQPEDEAEYYCTLWYSNRWVFGGGTKLTVLHHHHHH

SEQ ID NO: 3325 - protein, 507 aa, synthetic construct
  REGION 1..507: note = Description of Artificial Sequence: Synthetic polypeptide
EVQLVESGGGLVQPGRSLTLSCAASTNIFSINPMGWYRQAPGKQRELVAAIHGFDTLYADSVKGRFTISRDNAKNSIYLQMNSLRPEDTALYYCNKVPWGDYHPRNVSWGQGTQVTVSSGGGGSGGGSEVQLVESGGGLVQPGNSLRLSCAASGFTFSKFGMSWVRQAPGKGLEWVSSISGSGRDTLYADSVKGRFTISRDNAKTTLYLQMNSLRPEDTAVYYCTIGGSLSVSSQGTLVTVSSGGGGSGGGSEVQLVESGGGLVQPGGSLKLSCAASGFTFNKYAINWVRQAPGKGLEWVARIRSKYNNYATYYADQVKDRFTISRDDSKNTAYLQMNNLKTEDTAVYYCVRHANFGNSYISYWAYWGQGTLVTVSSGGGGSGGGGSGGGGSQTVVTQEPSLTVSPGGTVTLTCASSTGAVTSGNYPNWVQQKPGQAPRGLIGGTKFLVPGTPARFSGSLLGGKAALTLSGVQPEDEAEYYCTLWYSNRWVFGGGTKLTVLHHHHHH

SEQ ID NO: 3326 - protein, 507 aa, synthetic construct
  REGION 1..507: note = Description of Artificial Sequence: Synthetic polypeptide
EVQLVESGGGLVQPGRSLTLSCAASTNIFSITPMGWYRQAPGKQRELVAAIHGRSTLYADSVKGRFTISRDNAKNSIYLQMNSLRPEDTALYYCNKVPWGSYHPRNVYWGQGTQVTVSSGGGGSGGGSEVQLVESGGGLVQPGNSLRLSCAASGFTFSKFGMSWVRQAPGKGLEWVSSISGSGRDTLYADSVKGRFTISRDNAKTTLYLQMNSLRPEDTAVYYCTIGGSLSVSSQGTLVTVSSGGGGSGGGSEVQLVESGGGLVQPGGSLKLSCAASGFTFNKYAINWVRQAPGKGLEWVARIRSKYNNYATYYADQVKDRFTISRDDSKNTAYLQMNNLKTEDTAVYYCVRHANFGNSYISYWAYWGQGTLVTVSSGGGGSGGGGSGGGGSQTVVTQEPSLTVSPGGTVTLTCASSTGAVTSGNYPNWVQQKPGQAPRGLIGGTKFLVPGTPARFSGSLLGGKAALTLSGVQPEDEAEYYCTLWYSNRWVFGGGTKLTVLHHHHHH

SEQ ID NO: 3327 - protein, 507 aa, synthetic construct
  REGION 1..507: note = Description of Artificial Sequence: Synthetic polypeptide
EVQLVESGGGLVQPGRSLTLSCAASTNIFSITPMGWYRQAPGKQRELVAAIHGTSTLYADSVKGRFTISRDNAKNSIYLQMNSLRPEDTALYYCNKVPWGRYHPRNVYWGQGTQVTVSSGGGGSGGGSEVQLVESGGGLVQPGNSLRLSCAASGFTFSKFGMSWVRQAPGKGLEWVSSISGSGRDTLYADSVKGRFTISRDNAKTTLYLQMNSLRPEDTAVYYCTIGGSLSVSSQGTLVTVSSGGGGSGGGSEVQLVESGGGLVQPGGSLKLSCAASGFTFNKYAINWVRQAPGKGLEWVARIRSKYNNYATYYADQVKDRFTISRDDSKNTAYLQMNNLKTEDTAVYYCVRHANFGNSYISYWAYWGQGTLVTVSSGGGGSGGGGSGGGGSQTVVTQEPSLTVSPGGTVTLTCASSTGAVTSGNYPNWVQQKPGQAPRGLIGGTKFLVPGTPARFSGSLLGGKAALTLSGVQPEDEAEYYCTLWYSNRWVFGGGTKLTVLHHHHHH

SEQ ID NO: 3328 - protein, 507 aa, synthetic construct
  REGION 1..507: note = Description of Artificial Sequence: Synthetic polypeptide
EVQLVESGGGLVQPGRSLTLSCAASTNIFSITPMGWYRQAPGKQRELVAAIHGESTLYADSVKGRFTISRDNAKNSIYLQMNSLRPEDTALYYCNKVPWGRYHPRNVYWGQGTQVTVSSGGGGSGGGSEVQLVESGGGLVQPGNSLRLSCAASGFTFSKFGMSWVRQAPGKGLEWVSSISGSGRDTLYADSVKGRFTISRDNAKTTLYLQMNSLRPEDTAVYYCTIGGSLSVSSQGTLVTVSSGGGGSGGGSEVQLVESGGGLVQPGGSLKLSCAASGFTFNKYAINWVRQAPGKGLEWVARIRSKYNNYATYYADQVKDRFTISRDDSKNTAYLQMNNLKTEDTAVYYCVRHANFGNSYISYWAYWGQGTLVTVSSGGGGSGGGGSGGGGSQTVVTQEPSLTVSPGGTVTLTCASSTGAVTSGNYPNWVQQKPGQAPRGLIGGTKFLVPGTPARFSGSLLGGKAALTLSGVQPEDEAEYYCTLWYSNRWVFGGGTKLTVLHHHHHH

SEQ ID NO: 3329 - protein, 507 aa, synthetic construct
  REGION 1..507: note = Description of Artificial Sequence: Synthetic polypeptide
EVQLVESGGGLVQPGRSLTLSCAASTNIFSITPMGWYRQAPGKQRELVAAIHGESTLYADSVKGRFTISRDNAKNSIYLQMNSLRPEDTALYYCNKVPWGDYHPRDVYWGQGTQVTVSSGGGGSGGGSEVQLVESGGGLVQPGNSLRLSCAASGFTFSKFGMSWVRQAPGKGLEWVSSISGSGRDTLYADSVKGRFTISRDNAKTTLYLQMNSLRPEDTAVYYCTIGGSLSVSSQGTLVTVSSGGGGSGGGSEVQLVESGGGLVQPGGSLKLSCAASGFTFNKYAINWVRQAPGKGLEWVARIRSKYNNYATYYADQVKDRFTISRDDSKNTAYLQMNNLKTEDTAVYYCVRHANFGNSYISYWAYWGQGTLVTVSSGGGGSGGGGSGGGGSQTVVTQEPSLTVSPGGTVTLTCASSTGAVTSGNYPNWVQQKPGQAPRGLIGGTKFLVPGTPARFSGSLLGGKAALTLSGVQPEDEAEYYCTLWYSNRWVFGGGTKLTVLHHHHHH

SEQ ID NO: 3330 - protein, 507 aa, synthetic construct
  REGION 1..507: note = Description of Artificial Sequence: Synthetic polypeptide
EVQLVESGGGLVQPGRSLTLSCAASTNIFSTSPYGWYRQAPGKQRELVAAIHGFSTIYADSVKGRFTISRDNAKNSIYLQMNSLRPEDTALYYCNKVPWGDYHPGNVYWGQGTQVTVSSGGGGSGGGSEVQLVESGGGLVQPGNSLRLSCAASGFTFSKFGMSWVRQAPGKGLEWVSSISGSGRDTLYADSVKGRFTISRDNAKTTLYLQMNSLRPEDTAVYYCTIGGSLSVSSQGTLVTVSSGGGGSGGGSEVQLVESGGGLVQPGGSLKLSCAASGFTFNKYAINWVRQAPGKGLEWVARIRSKYNNYATYYADQVKDRFTISRDDSKNTAYLQMNNLKTEDTAVYYCVRHANFGNSYISYWAYWGQGTLVTVSSGGGGSGGGGSGGGGSQTVVTQEPSLTVSPGGTVTLTCASSTGAVTSGNYPNWVQQKPGQAPRGLIGGTKFLVPGTPARFSGSLLGGKAALTLSGVQPEDEAEYYCTLWYSNRWVFGGGTKLTVLHHHHHH

SEQ ID NO: 3331 - protein, 507 aa, synthetic construct
  REGION 1..507: note = Description of Artificial Sequence: Synthetic polypeptide
EVQLVESGGGLVQPGRSLTLSCAASTNIFSTSPGGWYRQAPGKQRELVAAIHGFSTIYADSVKGRFTISRDNAKNSIYLQMNSLRPEDTALYYCNKVPWGDYHPGNVYWGQGTQVTVSSGGGGSGGGSEVQLVESGGGLVQPGNSLRLSCAASGFTFSKFGMSWVRQAPGKGLEWVSSISGSGRDTLYADSVKGRFTISRDNAKTTLYLQMNSLRPEDTAVYYCTIGGSLSVSSQGTLVTVSSGGGGSGGGSEVQLVESGGGLVQPGGSLKLSCAASGFTFNKYAINWVRQAPGKGLEWVARIRSKYNNYATYYADQVKDRFTISRDDSKNTAYLQMNNLKTEDTAVYYCVRHANFGNSYISYWAYWGQGTLVTVSSGGGGSGGGGSGGGGSQTVVTQEPSLTVSPGGTVTLTCASSTGAVTSGNYPNWVQQKPGQAPRGLIGGTKFLVPGTPARFSGSLLGGKAALTLSGVQPEDEAEYYCTLWYSNRWVFGGGTKLTVLHHHHHH

SEQ ID NO: 3332 - protein, 507 aa, synthetic construct
  REGION 1..507: note = Description of Artificial Sequence: Synthetic polypeptide
EVQLVESGGGLVQPGRSLTLSCAASTNIFSITPYGWYRQAPGKQRELVAAIHGASTLYADSVKGRFTISRDNAKNSIYLQMNSLRPEDTALYYCNKVPWGDYHPGNVYWGQGTQVTVSSGGGGSGGGSEVQLVESGGGLVQPGNSLRLSCAASGFTFSKFGMSWVRQAPGKGLEWVSSISGSGRDTLYADSVKGRFTISRDNAKTTLYLQMNSLRPEDTAVYYCTIGGSLSVSSQGTLVTVSSGGGGSGGGSEVQLVESGGGLVQPGGSLKLSCAASGFTFNKYAINWVRQAPGKGLEWVARIRSKYNNYATYYADQVKDRFTISRDDSKNTAYLQMNNLKTEDTAVYYCVRHANFGNSYISYWAYWGQGTLVTVSSGGGGSGGGGSGGGGSQTVVTQEPSLTVSPGGTVTLTCASSTGAVTSGNYPNWVQQKPGQAPRGLIGGTKFLVPGTPARFSGSLLGGKAALTLSGVQPEDEAEYYCTLWYSNRWVFGGGTKLTVLHHHHHH

SEQ ID NO: 3333 - protein, 507 aa, synthetic construct
  REGION 1..507: note = Description of Artificial Sequence: Synthetic polypeptide
EVQLVESGGGLVQPGRSLTLSCAASTNIFSITPGGWYRQAPGKQRELVAAIHGASTLYADSVKGRFTISRDNAKNSIYLQMNSLRPEDTALYYCNKVPWGDYHPGNVYWGQGTQVTVSSGGGGSGGGSEVQLVESGGGLVQPGNSLRLSCAASGFTFSKFGMSWVRQAPGKGLEWVSSISGSGRDTLYADSVKGRFTISRDNAKTTLYLQMNSLRPEDTAVYYCTIGGSLSVSSQGTLVTVSSGGGGSGGGSEVQLVESGGGLVQPGGSLKLSCAASGFTFNKYAINWVRQAPGKGLEWVARIRSKYNNYATYYADQVKDRFTISRDDSKNTAYLQMNNLKTEDTAVYYCVRHANFGNSYISYWAYWGQGTLVTVSSGGGGSGGGGSGGGGSQTVVTQEPSLTVSPGGTVTLTCASSTGAVTSGNYPNWVQQKPGQAPRGLIGGTKFLVPGTPARFSGSLLGGKAALTLSGVQPEDEAEYYCTLWYSNRWVFGGGTKLTVLHHHHHH

SEQ ID NO: 3334 - protein, 499 aa, synthetic construct
  REGION 1..499: note = Description of Artificial Sequence: Synthetic polypeptide
EVQLVESGGGLVQPGGSLTLSCAASRFMISEYSMHWVRQAPGKGLEWVSTINPAGTTDYAESVKGRFTISRDNAKNTLYLQMNSLKPEDTAVYYCDGYGYRGQGTQVTVSSGGGGSGGGSEVQLVESGGGLVQPGNSLRLSCAASGFTFSKFGMSWVRQAPGKGLEWVSSISGSGRDTLYADSVKGRFTISRDNAKTTLYLQMNSLRPEDTAVYYCTIGGSLSVSSQGTLVTVSSGGGGSGGGSEVQLVESGGGLVQPGGSLKLSCAASGFTFNKYAINWVRQAPGKGLEWVARIRSKYNNYATYYADQVKDRFTISRDDSKNTAYLQMNNLKTEDTAVYYCVRHANFGNSYISYWAYWGQGTLVTVSSGGGGSGGGGSGGGGSQTVVTQEPSLTVSPGGTVTLTCASSTGAVTSGNYPNWVQQKPGQAPRGLIGGTKFLVPGTPARFSGSLLGGKAALTLSGVQPEDEAEYYCTLWYSNRWVFGGGTKLTVLHHHHHH

SEQ ID NO: 3335 - protein, 499 aa, synthetic construct
  REGION 1..499: note = Description of Artificial Sequence: Synthetic polypeptide
EVQLVESGGGLVQPGGSLTLSCAASRFMISEYSMHWVRQAPGKGLEWVSTINPAGTTDYAESVKGRFTISRDNAKNTLYLQMNSLKPEDTAVYYCDGYGYRGQGTQVTVSSGGGGSGGGSEVQLVESGGGLVQPGNSLRLSCAASGFTFSKFGMSWVRQAPGKGLEWVSSISGSGRDTLYADSVKGRFTISRDNAKTTLYLQMNSLRPEDTAVYYCTIGGSLSVSSQGTLVTVSSGGGGSGGGSEVQLVESGGGLVQPGGSLKLSCAASGFTFNNYAMNWVRQAPGKGLEWVARIRSGYNNYATYYADSVKDRFTISRDDSKNTAYLQMNNLKTEDTAVYYCVRHGNFGNSYISYWAYWGQGTLVTVSSGGGGSGGGGSGGGGSQTVVTQEPSLTVSPGGTVTLTCGSYTGAVTSGNYPNWVQQKPGQAPRGLIGGTKFNAPGTPARFSGSLLGGKAALTLSGVQPEDEAEYYCVLWYANRWVFGGGTKLTVLHHHHHH

SEQ ID NO: 3336 - protein, 499 aa, synthetic construct
  REGION 1..499: note = Description of Artificial Sequence: Synthetic polypeptide
EVQLVESGGGLVQPGGSLTLSCAASRFMISEYSMHWVRQAPGKGLEWVSTINPAGTTDYAESVKGRFTISRDNAKNTLYLQMNSLKPEDTAVYYCDGYGYRGQGTQVTVSSGGGGSGGGSEVQLVESGGGLVQPGNSLRLSCAASGFTFSKFGMSWVRQAPGKGLEWVSSISGSGRDTLYADSVKGRFTISRDNAKTTLYLQMNSLRPEDTAVYYCTIGGSLSVSSQGTLVTVSSGGGGSGGGSEVQLVESGGGLVQPGGSLKLSCAASGFEFNKYAMNWVRQAPGKGLEWVARIRSKYNNYETYYADSVKDRFTISRDDSKNTAYLQMNNLKTEDTAVYYCVRHGNFGNSLISYWAYWGQGTLVTVSSGGGGSGGGGSGGGGSQTVVTQEPSLTVSPGGTVTLTCGSSSGAVTSGNYPNWVQQKPGQAPRGLIGGTKFGAPGTPARFSGSLLGGKAALTLSGVQPEDEAEYYCVLWYSNRWVFGGGTKLTVLHHHHHH

SEQ ID NO: 3337 - protein, 499 aa, synthetic construct
  REGION 1..499: note = Description of Artificial Sequence: Synthetic polypeptide
EVQLVESGGGLVQPGGSLTLSCAASRFMISEYSMHWVRQAPGKGLEWVSTINPAGTTDYAESVKGRFTISRDNAKNTLYLQMNSLKPEDTAVYYCDGYGYRGQGTQVTVSSGGGGSGGGSEVQLVESGGGLVQPGNSLRLSCAASGFTFSSFGMSWVRQAPGKGLEWVSSISGSGSDTLYADSVKGRFTISRDNAKTTLYLQMNSLRPEDTAVYYCTIGGSLSRSSQGTLVTVSSGGGGSGGGSEVQLVESGGGLVQPGGSLKLSCAASGFTFNKYAMNWVRQAPGKGLEWVARIRSKYNNYATYYADSVKDRFTISRDDSKNTAYLQMNNLKTEDTAVYYCVRHGNFGNSYISYWAYWGQGTLVTVSSGGGGSGGGGSGGGGSQTVVTQEPSLTVSPGGTVTLTCGSSTGAVTSGNYPNWVQQKPGQAPRGLIGGTKFLAPGTPARFSGSLLGGKAALTLSGVQPEDEAEYYCVLWYSNRWVFGGGTKLTVLHHHHHH

SEQ ID NO: 3338 - protein, 499 aa, synthetic construct
  REGION 1..499: note = Description of Artificial Sequence: Synthetic polypeptide
EVQLVESGGGLVQPGGSLRLSCAASRFMISEYSMHWVRQAPGKGLEWVSTINPAGTTDYAESVKGRFTISRDNAKNTLYLQMNSLRAEDTAVYYCDGYGYRGQGTLVTVSSGGGGSGGGSEVQLVESGGGLVQPGNSLRLSCAASGFTFSKFGMSWVRQAPGKGLEWVSSISGSGRDTLYADSVKGRFTISRDNAKTTLYLQMNSLRPEDTAVYYCTIGGSLSVSSQGTLVTVSSGGGGSGGGSEVQLVESGGGLVQPGGSLKLSCAASGFTFNKYAINWVRQAPGKGLEWVARIRSKYNNYATYYADQVKDRFTISRDDSKNTAYLQMNNLKTEDTAVYYCVRHANFGNSYISYWAYWGQGTLVTVSSGGGGSGGGGSGGGGSQTVVTQEPSLTVSPGGTVTLTCASSTGAVTSGNYPNWVQQKPGQAPRGLIGGTKFLVPGTPARFSGSLLGGKAALTLSGVQPEDEAEYYCTLWYSNRWVFGGGTKLTVLHHHHHH

SEQ ID NO: 3339 - protein, 499 aa, synthetic construct
  REGION 1..499: note = Description of Artificial Sequence: Synthetic polypeptide
EVQLVESGGGLVQPGGSLTLSCAASRFMISEYHMHWVRQAPGKGLEWVSDINPAGTTDYAESVKGRFTISRDNAKNTLYLQMNSLKPEDTAVYYCDSYGYRGQGTQVTVSSGGGGSGGGSEVQLVESGGGLVQPGNSLRLSCAASGFTFSKFGMSWVRQAPGKGLEWVSSISGSGRDTLYADSVKGRFTISRDNAKTTLYLQMNSLRPEDTAVYYCTIGGSLSVSSQGTLVTVSSGGGGSGGGSEVQLVESGGGLVQPGGSLKLSCAASGFTFNKYAINWVRQAPGKGLEWVARIRSKYNNYATYYADQVKDRFTISRDDSKNTAYLQMNNLKTEDTAVYYCVRHANFGNSYISYWAYWGQGTLVTVSSGGGGSGGGGSGGGGSQTVVTQEPSLTVSPGGTVTLTCASSTGAVTSGNYPNWVQQKPGQAPRGLIGGTKFLVPGTPARFSGSLLGGKAALTLSGVQPEDEAEYYCTLWYSNRWVFGGGTKLTVLHHHHHH

SEQ ID NO: 3340 - protein, 499 aa, synthetic construct
  REGION 1..499: note = Description of Artificial Sequence: Synthetic polypeptide
EVQLVESGGGLVQPGGSLTLSCAASRFMISEYHMHWVRQAPGKGLEWVSTINPAGTTDYAESVKGRFTISRDNAKNTLYLQMNSLKPEDTAVYYCDSYGYRGQGTQVTVSSGGGGSGGGSEVQLVESGGGLVQPGNSLRLSCAASGFTFSKFGMSWVRQAPGKGLEWVSSISGSGRDTLYADSVKGRFTISRDNAKTTLYLQMNSLRPEDTAVYYCTIGGSLSVSSQGTLVTVSSGGGGSGGGSEVQLVESGGGLVQPGGSLKLSCAASGFTFNKYAINWVRQAPGKGLEWVARIRSKYNNYATYYADQVKDRFTISRDDSKNTAYLQMNNLKTEDTAVYYCVRHANFGNSYISYWAYWGQGTLVTVSSGGGGSGGGGSGGGGSQTVVTQEPSLTVSPGGTVTLTCASSTGAVTSGNYPNWVQQKPGQAPRGLIGGTKFLVPGTPARFSGSLLGGKAALTLSGVQPEDEAEYYCTLWYSNRWVFGGGTKLTVLHHHHHH

SEQ ID NO: 3341 - protein, 504 aa, synthetic construct
  REGION 1..504: note = Description of Artificial Sequence: Synthetic polypeptide
QVQLVESGGGLVKPGESLRLSCAASGFTFSDYYMYWVRQAPGKGLEWVAIISDGGYYTYYSDIIKGRFTISRDNAKNSLYLQMNSLKAEDTAVYYCARGFPLLRHGAMDYWGQGTLVTVSSGGGGSGGGGSGGGGSDIQMTQSPSSLSASVGDRVTITCKASQNVDTNVAWYQQKPGQAPKSLIYSASYRYSDVPSRFSGSASGTDFTLTISSVQSEDFATYYCQQYDSYPYTFGGGTKLEIKSGGGGSEVQLVESGGGLVQPGGSLKLSCAASGFTFNKYAMNWVRQAPGKGLEWVARIRSKYNNYATYYADSVKDRFTISRDDSKNTAYLQMNNLKTEDTAVYYCVRHGNFGNSYISYWAYWGQGTLVTVSSGGGGSGGGGSGGGGSQTVVTQEPSLTVSPGGTVTLTCGSSTGAVTSGNYPNWVQQKPGQAPRGLIGGTKFLAPGTPARFSGSLLGGKAALTLSGVQPEDEAEYYCVLWYSNRWVFGGGTKLTVLHHHHHH

SEQ ID NO: 3342 - protein, 512 aa, synthetic construct
  REGION 1..512: note = Description of Artificial Sequence: Synthetic polypeptide
QVKLEESGGGSVQTGGSLRLTCAASGRTSRSYGMGWFRQAPGKEREFVSGISWRGDSTGYADSVKGRFTISRDNAKNTVDLQMNSLKPEDTAIYYCAAAAGSAWYGTLYEYDYWGQGTQVTVSSGGGGSGGGSEVQLVESGGGLVQPGNSLRLSCAASGFTFSSFGMSWVRQAPGKGLEWVSSISGSGSDTLYADSVKGRFTISRDNAKTTLYLQMNSLRPEDTAVYYCTIGGSLSRSSQGTLVTVSSGGGGSGGGSEVQLVESGGGLVQPGGSLKLSCAASGFTFNKYAMNWVRQAPGKGLEWVARIRSKYNNYATYYADSVKDRFTISRDDSKNTAYLQMNNLKTEDTAVYYCVRHGNFGNSYISYWAYWGQGTLVTVSSGGGGSGGGGSGGGGSQTVVTQEPSLTVSPGGTVTLTCGSSTGAVTSGNYPNWVQQKPGQAPRGLIGGTKFLAPGTPARFSGSLLGGKAALTLSGVQPEDEAEYYCVLWYSNRWVFGGGTKLTVLHHHHHH

SEQ ID NO: 3343 - protein, 508 aa, synthetic construct
  REGION 1..508: note = Description of Artificial Sequence: Synthetic polypeptide
QVQLVESGGGVVQAGRSLTLSCAYSGVTVNVYRMGWFRQAPGKEREFVANINWSGNNRDYADSVRGRFTISRDNSKNTLYLQMNSLRAEDTAVYYCASEKPGRLGEYDYGSQGTLVTVSSGGGGSGGGSEVQLVESGGGLVQPGNSLRLSCAASGFTFSKFGMSWVRQAPGKGLEWVSSISGSGRDTLYADSVKGRFTISRDNAKTTLYLQMNSLRPEDTAVYYCTIGGSLSVSSQGTLVTVSSGGGGSGGGSEVQLVESGGGLVQPGGSLKLSCAASGFTFNKYAINWVRQAPGKGLEWVARIRSKYNNYATYYADQVKDRFTISRDDSKNTAYLQMNNLKTEDTAVYYCVRHANFGNSYISYWAYWGQGTLVTVSSGGGGSGGGGSGGGGSQTVVTQEPSLTVSPGGTVTLTCASSTGAVTSGNYPNWVQQKPGQAPRGLIGGTKFLVPGTPARFSGSLLGGKAALTLSGVQPEDEAEYYCTLWYSNRWVFGGGTKLTVLHHHHHH

SEQ ID NO: 3344 - protein, 508 aa, synthetic construct
  REGION 1..508: note = Description of Artificial Sequence: Synthetic polypeptide
QVQLVESGGGVVQAGRSLRLSCAYSGVTVNVYRMGWFRQAPGKEREFVANINWSGNNRDYADSVRGRFTISRDNSKNTLYLQMNSLRAEDTAVYYCASEKPGRLGEYDYGSQGTLVTVSSGGGGSGGGSEVQLVESGGGLVQPGNSLRLSCAASGFTFSKFGMSWVRQAPGKGLEWVSSISGSGRDTLYADSVKGRFTISRDNAKTTLYLQMNSLRPEDTAVYYCTIGGSLSVSSQGTLVTVSSGGGGSGGGSEVQLVESGGGLVQPGGSLKLSCAASGFTFNKYAINWVRQAPGKGLEWVARIRSKYNNYATYYADQVKDRFTISRDDSKNTAYLQMNNLKTEDTAVYYCVRHANFGNSYISYWAYWGQGTLVTVSSGGGGSGGGGSGGGGSQTVVTQEPSLTVSPGGTVTLTCASSTGAVTSGNYPNWVQQKPGQAPRGLIGGTKFLVPGTPARFSGSLLGGKAALTLSGVQPEDEAEYYCTLWYSNRWVFGGGTKLTVLHHHHHH

SEQ ID NO: 3345 - protein, 499 aa, synthetic construct
  REGION 1..499: note = Description of Artificial Sequence: Synthetic polypeptide
EVQLVESGGGLVQPGGSLTLSCAASRFMISEYHMHWVRQAPGKGLEWVSTINPAGTTDYAESVKGRFTISRDNAKNTLYLQMNSLRAEDTAVYYCDSYGYRGQGTLVTVSSGGGGSGGGSEVQLVESGGGLVQPGNSLRLSCAASGFTFSKFGMSWVRQAPGKGLEWVSSISGSGRDTLYADSVKGRFTISRDNAKTTLYLQMNSLRPEDTAVYYCTIGGSLSVSSQGTLVTVSSGGGGSGGGSEVQLVESGGGLVQPGGSLKLSCAASGFTFNKYAINWVRQAPGKGLEWVARIRSKYNNYATYYADQVKDRFTISRDDSKNTAYLQMNNLKTEDTAVYYCVRHANFGNSYISYWAYWGQGTLVTVSSGGGGSGGGGSGGGGSQTVVTQEPSLTVSPGGTVTLTCASSTGAVTSGNYPNWVQQKPGQAPRGLIGGTKFLVPGTPARFSGSLLGGKAALTLSGVQPEDEAEYYCTLWYSNRWVFGGGTKLTVLHHHHHH

SEQ ID NO: 3346 - protein, 511 aa, synthetic construct
  REGION 1..511: note = Description of Artificial Sequence: Synthetic polypeptide
QVQLVESGGGLVQAGGSLRLSCVASGSTSNINNMRWYRQAPGKERELVAVITRGGYAIYLDAVKGRFTISRDNANNAIYLEMNSLKPEDTAVYVCNADRVEGTSGGPQLRDYFGQGTQVTVSSGGGGSGGGSEVQLVESGGGLVQPGNSLRLSCAASGFTFSSFGMSWVRQAPGKGLEWVSSISGSGSDTLYADSVKGRFTISRDNAKTTLYLQMNSLRPEDTAVYYCTIGGSLSRSSQGTLVTVSSGGGGSGGGSEVQLVESGGGLVQPGGSLKLSCAASGFTFNKYAMNWVRQAPGKGLEWVARIRSKYNNYATYYADSVKDRFTISRDDSKNTAYLQMNNLKTEDTAVYYCVRHGNFGNSYISYWAYWGQGTLVTVSSGGGGSGGGGSGGGGSQTVVTQEPSLTVSPGGTVTLTCGSSTGAVTSGNYPNWVQQKPGQAPRGLIGGTKFLAPGTPARFSGSLLGGKAALTLSGVQPEDEAEYYCVLWYSNRWVFGGGTKLTVLHHHHHH

SEQ ID NO: 3347 - protein, 504 aa, synthetic construct
  REGION 1..504: note = Description of Artificial Sequence: Synthetic polypeptide
QVQLVESGGGLVQAGGSLRLSCAASGSTFGINAMGWYRQAPGKQRELVAVISRGGSTNYADSVKGRFTISRDNAENTVSLQMNTLKPEDTAVYFCNARTYTRHDYWGQGTQVTVSSGGGGSGGGSEVQLVESGGGLVQPGNSLRLSCAASGFTFSSFGMSWVRQAPGKGLEWVSSISGSGSDTLYADSVKGRFTISRDNAKTTLYLQMNSLRPEDTAVYYCTIGGSLSRSSQGTLVTVSSGGGGSGGGSEVQLVESGGGLVQPGGSLKLSCAASGFTFNKYAMNWVRQAPGKGLEWVARIRSKYNNYATYYADSVKDRFTISRDDSKNTAYLQMNNLKTEDTAVYYCVRHGNFGNSYISYWAYWGQGTLVTVSSGGGGSGGGGSGGGGSQTVVTQEPSLTVSPGGTVTLTCGSSTGAVTSGNYPNWVQQKPGQAPRGLIGGTKFLAPGTPARFSGSLLGGKAALTLSGVQPEDEAEYYCVLWYSNRWVFGGGTKLTVLHHHHHH

SEQ ID NO: 3348 - protein, 510 aa, synthetic construct
  REGION 1..510: note = Description of Artificial Sequence: Synthetic polypeptide
QVRLVESGGGLVQAGGSLRLSCAASISAFRLMSVRWYRQDPSKQREWVATIDQLGRTNYADSVKGRFAISKDSTRNTVYLQMNMLRPEDTAVYYCNAGGGPLGSRWLRGRHWGQGTQVTVSSGGGGSGGGSEVQLVESGGGLVQPGNSLRLSCAASGFTFSSFGMSWVRQAPGKGLEWVSSISGSGSDTLYADSVKGRFTISRDNAKTTLYLQMNSLRPEDTAVYYCTIGGSLSRSSQGTLVTVSSGGGGSGGGSEVQLVESGGGLVQPGGSLKLSCAASGFTFNKYAMNWVRQAPGKGLEWVARIRSKYNNYATYYADSVKDRFTISRDDSKNTAYLQMNNLKTEDTAVYYCVRHGNFGNSYISYWAYWGQGTLVTVSSGGGGSGGGGSGGGGSQTVVTQEPSLTVSPGGTVTLTCGSSTGAVTSGNYPNWVQQKPGQAPRGLIGGTKFLAPGTPARFSGSLLGGKAALTLSGVQPEDEAEYYCVLWYSNRWVFGGGTKLTVLHHHHHH

SEQ ID NO: 3349 - protein, 507 aa, synthetic construct
  REGION 1..507: note = Description of Artificial Sequence: Synthetic polypeptide
QVRLVESGGGLVQAGESLRLSCAASGRPFSINTMGWYRQAPGKQRELVASISSSGDFTYTDSVKGRFTISRDNAKNTVYLQMNSLKPEDTAVYYCNARRTYLPRRFGSWGQGTQVTVSSGGGGSGGGSEVQLVESGGGLVQPGNSLRLSCAASGFTFSSFGMSWVRQAPGKGLEWVSSISGSGSDTLYADSVKGRFTISRDNAKTTLYLQMNSLRPEDTAVYYCTIGGSLSRSSQGTLVTVSSGGGGSGGGSEVQLVESGGGLVQPGGSLKLSCAASGFTFNKYAMNWVRQAPGKGLEWVARIRSKYNNYATYYADSVKDRFTISRDDSKNTAYLQMNNLKTEDTAVYYCVRHGNFGNSYISYWAYWGQGTLVTVSSGGGGSGGGGSGGGGSQTVVTQEPSLTVSPGGTVTLTCGSSTGAVTSGNYPNWVQQKPGQAPRGLIGGTKFLAPGTPARFSGSLLGGKAALTLSGVQPEDEAEYYCVLWYSNRWVFGGGTKLTVLHHHHHH

SEQ ID NO: 3350 - protein, 507 aa, synthetic construct; identical to SEQ ID NO: 3349
  REGION 1..507: note = Description of Artificial Sequence: Synthetic polypeptide

SEQ ID NO: 3351 - protein, 505 aa, synthetic construct
  REGION 1..505: note = Description of Artificial Sequence: Synthetic polypeptide
QVQPVESGGGLVQPGGSLRLSCVVSGSDFTEDAMAWYRQASGKERESVAFVSKDGKRILYLDSVRGRFTISRDIDKKTVYLQMDNLKPEDTGVYYCNSAPGAARNYWGQGTQVTVSSGGGGSGGGSEVQLVESGGGLVQPGNSLRLSCAASGFTFSSFGMSWVRQAPGKGLEWVSSISGSGSDTLYADSVKGRFTISRDNAKTTLYLQMNSLRPEDTAVYYCTIGGSLSRSSQGTLVTVSSGGGGSGGGSEVQLVESGGGLVQPGGSLKLSCAASGFTFNKYAMNWVRQAPGKGLEWVARIRSKYNNYATYYADSVKDRFTISRDDSKNTAYLQMNNLKTEDTAVYYCVRHGNFGNSYISYWAYWGQGTLVTVSSGGGGSGGGGSGGGGSQTVVTQEPSLTVSPGGTVTLTCGSSTGAVTSGNYPNWVQQKPGQAPRGLIGGTKFLAPGTPARFSGSLLGGKAALTLSGVQPEDEAEYYCVLWYSNRWVFGGGTKLTVLHHHHHH

SEQ ID NO: 3352 - protein, 505 aa, synthetic construct
  REGION 1..505: note = Description of Artificial Sequence: Synthetic polypeptide
QVQPVESGGGLVQPGGSLRLSCVVSGSDFTEDAMAWYRQASGKERESVAFVSKDGKRILYLDSVRGRFTISRDIYKKTVYLQMDNLKPEDTGVYYCNSAPGAARNVWGQGTQVTVSSGGGGSGGGSEVQLVESGGGLVQPGNSLRLSCAASGFTFSSFGMSWVRQAPGKGLEWVSSISGSGSDTLYADSVKGRFTISRDNAKTTLYLQMNSLRPEDTAVYYCTIGGSLSRSSQGTLVTVSSGGGGSGGGSEVQLVESGGGLVQPGGSLKLSCAASGFTFNKYAMNWVRQAPGKGLEWVARIRSKYNNYATYYADSVKDRFTISRDDSKNTAYLQMNNLKTEDTAVYYCVRHGNFGNSYISYWAYWGQGTLVTVSSGGGGSGGGGSGGGGSQTVVTQEPSLTVSPGGTVTLTCGSSTGAVTSGNYPNWVQQKPGQAPRGLIGGTKFLAPGTPARFSGSLLGGKAALTLSGVQPEDEAEYYCVLWYSNRWVFGGGTKLTVLHHHHHH

SEQ ID NO: 3353 - protein, 503 aa, synthetic construct
  REGION 1..503: note = Description of Artificial Sequence: Synthetic polypeptide
EVQLVESGGGLVQPGNSLRLSCAASGFTFSSFGMSWVRQAPGKGLEWVSSISGSGSDTLYADSVKGRFTISRDNAKTTLYLQMNSLRPEDTAVYYCTIGGSLSRSSQGTLVTVSSGGGGSGGGSEVQLVESGGGLVQPGNSLRLSCAASGFTFSSFGMSWVRQAPGKGLEWVSSISGSGSDTLYADSVKGRFTISRDNAKTTLYLQMNSLRPEDTAVYYCTIGGSLSRSSQGTLVTVSSGGGGSGGGSEVQLVESGGGLVQPGGSLKLSCAASGFTFNKYAMNWVRQAPGKGLEWVARIRSKYNNYATYYADSVKDRFTISRDDSKNTAYLQMNNLKTEDTAVYYCVRHGNFGNSYISYWAYWGQGTLVTVSSGGGGSGGGGSGGGGSQTVVTQEPSLTVSPGGTVTLTCGSSTGAVTSGNYPNWVQQKPGQAPRGLIGGTKFLAPGTPARFSGSLLGGKAALTLSGVQPEDEAEYYCVLWYSNRWVFGGGTKLTVLHHHHHH

SEQ ID NO: 3354 - protein, 503 aa, synthetic construct; identical to SEQ ID NO: 3353
  REGION 1..503: note = Description of Artificial Sequence: Synthetic polypeptide

SEQ ID NO: 3355 - protein, 512 aa, synthetic construct
  REGION 1..512: note = Description of Artificial Sequence: Synthetic polypeptide
QVQIVESGGGLVQAGGSLRLSCVASGLTYSIVAVGWYRQAPGKEREMVADISPVGNTNYADSVKGRFTISKENAKNTVYLQMNSLKPEDTAVYYCHIVRGWLDERPGPGPIVYWGQGTQVTVSSGGGGSGGGSEVQLVESGGGLVQPGNSLRLSCAASGFTFSSFGMSWVRQAPGKGLEWVSSISGSGSDTLYADSVKGRFTISRDNAKTTLYLQMNSLRPEDTAVYYCTIGGSLSRSSQGTLVTVSSGGGGSGGGSEVQLVESGGGLVQPGGSLKLSCAASGFTFNKYAMNWVRQAPGKGLEWVARIRSKYNNYATYYADSVKDRFTISRDDSKNTAYLQMNNLKTEDTAVYYCVRHGNFGNSYISYWAYWGQGTLVTVSSGGGGSGGGGSGGGGSQTVVTQEPSLTVSPGGTVTLTCGSSTGAVTSGNYPNWVQQKPGQAPRGLIGGTKFLAPGTPARFSGSLLGGKAALTLSGVQPEDEAEYYCVLWYSNRWVFGGGTKLTVLHHHHHH

SEQ ID NO: 3356 - protein, 503 aa, synthetic construct
  REGION 1..503: note = Description of Artificial Sequence: Synthetic polypeptide
QVQLVESGGGLVQTGGSLRLSCAASGLTFGVYGMEWFRQAPGKQREWVASHTSTGYVYYRDSVKGRFTISRDNAKSTVYLQMNSLKPEDTAIYYCKANRGSYEYWGQGTQVTVSSGGGGSGGGSEVQLVESGGGLVQPGNSLRLSCAASGFTFSSFGMSWVRQAPGKGLEWVSSISGSGSDTLYADSVKGRFTISRDNAKTTLYLQMNSLRPEDTAVYYCTIGGSLSRSSQGTLVTVSSGGGGSGGGSEVQLVESGGGLVQPGGSLKLSCAASGFTFNKYAMNWVRQAPGKGLEWVARIRSKYNNYATYYADSVKDRFTISRDDSKNTAYLQMNNLKTEDTAVYYCVRHGNFGNSYISYWAYWGQGTLVTVSSGGGGSGGGGSGGGGSQTVVTQEPSLTVSPGGTVTLTCGSSTGAVTSGNYPNWVQQKPGQAPRGLIGGTKFLAPGTPARFSGSLLGGKAALTLSGVQPEDEAEYYCVLWYSNRWVFGGGTKLTVLHHHHHH

SEQ ID NO: 3357 - protein, 502 aa, synthetic construct
  REGION 1..502: note = Description of Artificial Sequence: Synthetic polypeptide
QVQLVESGGGLVQAGGSLRLSCAASTTSSINSMSWYRQAQGKQREPVAVITDRGSTSYADSVKGRFTISRDNAKNTVYLQMNSLKPEDTAIYTCHVIADWRGYWGQGTQVTVSSGGGGSGGGSEVQLVESGGGLVQPGNSLRLSCAASGFTFSSFGMSWVRQAPGKGLEWVSSISGSGSDTLYADSVKGRFTISRDNAKTTLYLQMNSLRPEDTAVYYCTIGGSLSRSSQGTLVTVSSGGGGSGGGSEVQLVESGGGLVQPGGSLKLSCAASGFTFNKYAMNWVRQAPGKGLEWVARIRSKYNNYATYYADSVKDRFTISRDDSKNTAYLQMNNLKTEDTAVYYCVRHGNFGNSYISYWAYWGQGTLVTVSSGGGGSGGGGSGGGGSQTVVTQEPSLTVSPGGTVTLTCGSSTGAVTSGNYPNWVQQKPGQAPRGLIGGTKFLAPGTPARFSGSLLGGKAALTLSGVQPEDEAEYYCVLWYSNRWVFGGGTKLTVLHHHHHH

SEQ ID NO: 3358 - protein, 508 aa, synthetic construct
  REGION 1..508: note = Description of Artificial Sequence: Synthetic polypeptide
QVQLVESGGGLVQAGGSLRLSCAASGRTLSRYAMGWFRQAPGKERQFVAAISRSGGTTRYSDSVKGRFTISRDNAANTFYLQMNNLRPDDTAVYYCNVRRRGWGRTLEYWGQGTQVTVSSGGGGSGGGSEVQLVESGGGLVQPGNSLRLSCAASGFTFSSFGMSWVRQAPGKGLEWVSSISGSGSDTLYADSVKGRFTISRDNAKTTLYLQMNSLRPEDTAVYYCTIGGSLSRSSQGTLVTVSSGGGGSGGGSEVQLVESGGGLVQPGGSLKLSCAASGFTFNKYAMNWVRQAPGKGLEWVARIRSKYNNYATYYADSVKDRFTISRDDSKNTAYLQMNNLKTEDTAVYYCVRHGNFGNSYISYWAYWGQGTLVTVSSGGGGSGGGGSGGGGSQTVVTQEPSLTVSPGGTVTLTCGSSTGAVTSGNYPNWVQQKPGQAPRGLIGGTKFLAPGTPARFSGSLLGGKAALTLSGVQPEDEAEYYCVLWYSNRWVFGGGTKLTVLHHHHHH

SEQ ID NO: 3359 - protein, 505 aa, synthetic construct
  REGION 1..505: note = Description of Artificial Sequence: Synthetic polypeptide
QVQLGESGGGLVQAGGSLRLSCAASGSIFSPNAMIWHRQAPGKQREPVASINSSGSTNYGDSVKGRFTVSRDIVKNTMYLQMNSLKPEDTAVYYCSYSDFRRGTQYWGQGTQVTVSSGGGGSGGGSEVQLVESGGGLVQPGNSLRLSCAASGFTFSSFGMSWVRQAPGKGLEWVSSISGSGSDTLYADSVKGRFTISRDNAKTTLYLQMNSLRPEDTAVYYCTIGGSLSRSSQGTLVTVSSGGGGSGGGSEVQLVESGGGLVQPGGSLKLSCAASGFTFNKYAMNWVRQAPGKGLEWVARIRSKYNNYATYYADSVKDRFTISRDDSKNTAYLQMNNLKTEDTAVYYCVRHGNFGNSYISYWAYWGQGTLVTVSSGGGGSGGGGSGGGGSQTVVTQEPSLTVSPGGTVTLTCGSSTGAVTSGNYPNWVQQKPGQAPRGLIGGTKFLAPGTPARFSGSLLGGKAALTLSGVQPEDEAEYYCVLWYSNRWVFGGGTKLTVLHHHHHH

SEQ ID NO: 3360 - protein, 505 aa, synthetic construct; identical to SEQ ID NO: 3359
  REGION 1..505: note = Description of Artificial Sequence: Synthetic polypeptide

SEQ ID NO: 3361 - protein, 507 aa, synthetic construct
  REGION 1..507: note = Description of Artificial Sequence: Synthetic polypeptide
QVQLVESGGGLVPSGGSLRLSCAASGATSAITNLGWYRRAPGQVREMVARISVREDKEDYEDSVKGRFTISRDNTQNLVYLQMNNLQPHDTAIYYCGAQRWGRGPGTTWGQGTQVTVSSGGGGSGGGSEVQLVESGGGLVQPGNSLRLSCAASGFTFSSFGMSWVRQAPGKGLEWVSSISGSGSDTLYADSVKGRFTISRDNAKTTLYLQMNSLRPEDTAVYYCTIGGSLSRSSQGTLVTVSSGGGGSGGGSEVQLVESGGGLVQPGGSLKLSCAASGFTFNKYAMNWVRQAPGKGLEWVARIRSKYNNYATYYADSVKDRFTISRDDSKNTAYLQMNNLKTEDTAVYYCVRHGNFGNSYISYWAYWGQGTLVTVSSGGGGSGGGGSGGGGSQTVVTQEPSLTVSPGGTVTLTCGSSTGAVTSGNYPNWVQQKPGQAPRGLIGGTKFLAPGTPARFSGSLLGGKAALTLSGVQPEDEAEYYCVLWYSNRWVFGGGTKLTVLHHHHHH

SEQ ID NO: 3362 - protein, 504 aa, synthetic construct
  REGION 1..504: note = Description of Artificial Sequence: Synthetic polypeptide
QVQLVESGGGLVQAGGSLRLSCAASGSTFRIRVMRWYRQAPGTERDLVAVISGSSTYYADSVKGRFTISRDNAKNTLYLQMNNLKPEDTAVYYCNADDSGIARDYWGQGTQVTVSSGGGGSGGGSEVQLVESGGGLVQPGNSLRLSCAASGFTFSSFGMSWVRQAPGKGLEWVSSISGSGSDTLYADSVKGRFTISRDNAKTTLYLQMNSLRPEDTAVYYCTIGGSLSRSSQGTLVTVSSGGGGSGGGSEVQLVESGGGLVQPGGSLKLSCAASGFTFNKYAMNWVRQAPGKGLEWVARIRSKYNNYATYYADSVKDRFTISRDDSKNTAYLQMNNLKTEDTAVYYCVRHGNFGNSYISYWAYWGQGTLVTVSSGGGGSGGGGSGGGGSQTVVTQEPSLTVSPGGTVTLTCGSSTGAVTSGNYPNWVQQKPGQAPRGLIGGTKFLAPGTPARFSGSLLGGKAALTLSGVQPEDEAEYYCVLWYSNRWVFGGGTKLTVLHHHHHH

SEQ ID NO: 3363 - protein, 506 aa, synthetic construct
  REGION 1..506: note = Description of Artificial Sequence: Synthetic polypeptide
QVQLVESGGGLVQAGESRRLSCAVSGDTSKFKAVGWYRQAPGAQRELLAWINNSGVGNTAESVKGRFTISRDNAKNTVYLQMNRLTPEDTDVYYCRFYRRFGINKNYWGQGTQVTVSSGGGGSGGGSEVQLVESGGGLVQPGNSLRLSCAASGFTFSSFGMSWVRQAPGKGLEWVSSISGSGSDTLYADSVKGRFTISRDNAKTTLYLQMNSLRPEDTAVYYCTIGGSLSRSSQGTLVTVSSGGGGSGGGSEVQLVESGGGLVQPGGSLKLSCAASGFTFNKYAMNWVRQAPGKGLEWVARIRSKYNNYATYYADSVKDRFTISRDDSKNTAYLQMNNLKTEDTAVYYCVRHGNFGNSYISYWAYWGQGTLVTVSSGGGGSGGGGSGGGGSQTVVTQEPSLTVSPGGTVTLTCGSSTGAVTSGNYPNWVQQKPGQAPRGLIGGTKFLAPGTPARFSGSLLGGKAALTLSGVQPEDEAEYYCVLWYSNRWVFGGGTKLTVLHHHHHH

SEQ ID NO: 3364 - protein, 510 aa, synthetic construct
  REGION 1..510: note = Description of Artificial Sequence: Synthetic polypeptide
QVQLVESGGGLVQAGGSLRLSCAASGSTFGNKPMGWYRQAPGKQRELVAVISSDGGSTRYAALVKGRFTISRDNAKNTVYLQMESLVAEDTAVYYCNALRTYYLNDPVVFSWGQGTQVTVSSGGGGSGGGSEVQLVESGGGLVQPGNSLRLSCAASGFTFSSFGMSWVRQAPGKGLEWVSSISGSGSDTLYADSVKGRFTISRDNAKTTLYLQMNSLRPEDTAVYYCTIGGSLSRSSQGTLVTVSSGGGGSGGGSEVQLVESGGGLVQPGGSLKLSCAASGFTFNKYAMNWVRQAPGKGLEWVARIRSKYNNYATYYADSVKDRFTISRDDSKNTAYLQMNNLKTEDTAVYYCVRHGNFGNSYISYWAYWGQGTLVTVSSGGGGSGGGGSGGGGSQTVVTQEPSLTVSPGGTVTLTCGSSTGAVTSGNYPNWVQQKPGQAPRGLIGGTKFLAPGTPARFSGSLLGGKAALTLSGVQPEDEAEYYCVLWYSNRWVFGGGTKLTVLHHHHHH

SEQ ID NO: 3365 - protein, 507 aa, synthetic construct
  REGION 1..507: note = Description of Artificial Sequence: Synthetic polypeptide
QVQLVESGGGLVQAGGSLRLSCAASGSTSSINTMYWYRQAPGKERELVAFISSGGSTNVRDSVKGRFSVSRDSAKNIVYLQMNSLTPEDTAVYYCNTYIPLRGTLHDYWGQGTQVTVSSGGGGSGGGSEVQLVESGGGLVQPGNSLRLSCAASGFTFSSFGMSWVRQAPGKGLEWVSSISGSGSDTLYADSVKGRFTISRDNAKTTLYLQMNSLRPEDTAVYYCTIGGSLSRSSQGTLVTVSSGGGGSGGGSEVQLVESGGGLVQPGGSLKLSCAASGFTFNKYAMNWVRQAPGKGLEWVARIRSKYNNYATYYADSVKDRFTISRDDSKNTAYLQMNNLKTEDTAVYYCVRHGNFGNSYISYWAYWGQGTLVTVSSGGGGSGGGGSGGGGSQTVVTQEPSLTVSPGGTVTLTCGSSTGAVTSGNYPNWVQQKPGQAPRGLIGGTKFLAPGTPARFSGSLLGGKAALTLSGVQPEDEAEYYCVLWYSNRWVFGGGTKLTVLHHHHHH

SEQ ID NO: 3366 - protein, 503 aa, synthetic construct
  REGION 1..503: note = Description of Artificial Sequence: Synthetic polypeptide
QVQLVESGGGLVQAGGSLRLSCVASGRTDRITTMGWYRQAPGKQRELVATISNRGTSNYANSVKGRFTISRDNAKNTVYLQMNSLKPEDTAVYYCNARKWGRNYWGQGTQVTVSSGGGGSGGGSEVQLVESGGGLVQPGNSLRLSCAASGFTFSSFGMSWVRQAPGKGLEWVSSISGSGSDTLYADSVKGRFTISRDNAKTTLYLQMNSLRPEDTAVYYCTIGGSLSRSSQGTLVTVSSGGGGSGGGSEVQLVESGGGLVQPGGSLKLSCAASGFTFNKYAMNWVRQAPGKGLEWVARIRSKYNNYATYYADSVKDRFTISRDDSKNTAYLQMNNLKTEDTAVYYCVRHGNFGNSYISYWAYWGQGTLVTVSSGGGGSGGGGSGGGGSQTVVTQEPSLTVSPGGTVTLTCGSSTGAVTSGNYPNWVQQKPGQAPRGLIGGTKFLAPGTPARFSGSLLGGKAALTLSGVQPEDEAEYYCVLWYSNRWVFGGGTKLTVLHHHHHH

SEQ ID NO: 3367 - protein, 507 aa, synthetic construct
  REGION 1..507: note = Description of Artificial Sequence: Synthetic polypeptide
QVQLVESGGGLVQARGSLRLSCTASGRTIGINDMAWYRQAPGNQRELVATITKGGTTDYADSVDGRFTISRDNAKNTVYLQMNSLKPEDTAVYYCNTKRREWAKDFEYWGQGTQVTVSSGGGGSGGGSEVQLVESGGGLVQPGNSLRLSCAASGFTFSSFGMSWVRQAPGKGLEWVSSISGSGSDTLYADSVKGRFTISRDNAKTTLYLQMNSLRPEDTAVYYCTIGGSLSRSSQGTLVTVSSGGGGSGGGSEVQLVESGGGLVQPGGSLKLSCAASGFTFNKYAMNWVRQAPGKGLEWVARIRSKYNNYATYYADSVKDRFTISRDDSKNTAYLQMNNLKTEDTAVYYCVRHGNFGNSYISYWAYWGQGTLVTVSSGGGGSGGGGSGGGGSQTVVTQEPSLTVSPGGTVTLTCGSSTGAVTSGNYPNWVQQKPGQAPRGLIGGTKFLAPGTPARFSGSLLGGKAALTLSGVQPEDEAEYYCVLWYSNRWVFGGGTKLTVLHHHHHH

SEQ ID NO: 3368 - protein, 502 aa, synthetic construct
  REGION 1..502: note = Description of Artificial Sequence: Synthetic polypeptide
QVQLVESGGGLVQAGGSLRLSCAASAIGSINSMSWYRQAPGKQREPVAVITDRGSTSYADSVKGRFTISRDNAKNTVYLQMNSLKPEDTAIYTCHVIADWRGYWGQGTQVTVSSGGGGSGGGSEVQLVESGGGLVQPGNSLRLSCAASGFTFSSFGMSWVRQAPGKGLEWVSSISGSGSDTLYADSVKGRFTISRDNAKTTLYLQMNSLRPEDTAVYYCTIGGSLSRSSQGTLVTVSSGGGGSGGGSEVQLVESGGGLVQPGGSLKLSCAASGFTFNKYAMNWVRQAPGKGLEWVARIRSKYNNYATYYADSVKDRFTISRDDSKNTAYLQMNNLKTEDTAVYYCVRHGNFGNSYISYWAYWGQGTLVTVSSGGGGSGGGGSGGGGSQTVVTQEPSLTVSPGGTVTLTCGSSTGAVTSGNYPNWVQQKPGQAPRGLIGGTKFLAPGTPARFSGSLLGGKAALTLSGVQPEDEAEYYCVLWYSNRWVFGGGTKLTVLHHHHHH

SEQ ID NO: 3369 - protein, 507 aa, synthetic construct
  REGION 1..507: note = Description of Artificial Sequence: Synthetic polypeptide
QVQLVESGGGLVQAGGSLRLSCAASGSTSSINTMYWFRQAPGEERELVATINRGGSTNVRDSVKGRFSVSRDSAKNIVYLQMNRLKPEDTAVYYCNTYIPYGGTLHDFWGQGTQVTVSSGGGGSGGGSEVQLVESGGGLVQPGNSLRLSCAASGFTFSSFGMSWVRQAPGKGLEWVSSISGSGSDTLYADSVKGRFTISRDNAKTTLYLQMNSLRPEDTAVYYCTIGGSLSRSSQGTLVTVSSGGGGSGGGSEVQLVESGGGLVQPGGSLKLSCAASGFTFNKYAMNWVRQAPGKGLEWVARIRSKYNNYATYYADSVKDRFTISRDDSKNTAYLQMNNLKTEDTAVYYCVRHGNFGNSYISYWAYWGQGTLVTVSSGGGGSGGGGSGGGGSQTVVTQEPSLTVSPGGTVTLTCGSSTGAVTSGNYPNWVQQKPGQAPRGLIGGTKFLAPGTPARFSGSLLGGKAALTLSGVQPEDEAEYYCVLWYSNRWVFGGGTKLTVLHHHHHH

SEQ ID NO: 3370 - protein, 507 aa, synthetic construct; identical to SEQ ID NO: 3369
  REGION 1..507: note = Description of Artificial Sequence: Synthetic polypeptide

SEQ ID NO: 3371 - protein, 502 aa, synthetic construct
  REGION 1..502: note = Description of Artificial Sequence: Synthetic polypeptide
QVQLVESGGGLVQAGGSLRLSCTTSTTFSINSMSWYRQAPGNQREPVAVITNRGTTSYADSVKGRFTISRDNARNTVYLQMDSLKPEDTAIYTCHVIADWRGYWGQGTQVTVSSGGGGSGGGSEVQLVESGGGLVQPGNSLRLSCAASGFTFSSFGMSWVRQAPGKGLEWVSSISGSGSDTLYADSVKGRFTISRDNAKTTLYLQMNSLRPEDTAVYYCTIGGSLSRSSQGTLVTVSSGGGGSGGGSEVQLVESGGGLVQPGGSLKLSCAASGFTFNKYAMNWVRQAPGKGLEWVARIRSKYNNYATYYADSVKDRFTISRDDSKNTAYLQMNNLKTEDTAVYYCVRHGNFGNSYISYWAYWGQGTLVTVSSGGGGSGGGGSGGGGSQTVVTQEPSLTVSPGGTVTLTCGSSTGAVTSGNYPNWVQQKPGQAPRGLIGGTKFLAPGTPARFSGSLLGGKAALTLSGVQPEDEAEYYCVLWYSNRWVFGGGTKLTVLHHHHHH

SEQ ID NO: 3372 - protein, 504 aa, synthetic construct
  REGION 1..504: note = Description of Artificial Sequence: Synthetic polypeptide
QVQLVESGGGLVQAGGSLTLSCAASGSTFSIRAMRWYRQAPGTERDLVAVIYGSSTYYADAVKGRFTISRDNAKNTLYLQMNNLKPEDTAVYYCNADTIGTARDYWGQGTQVTVSSGGGGSGGGSEVQLVESGGGLVQPGNSLRLSCAASGFTFSSFGMSWVRQAPGKGLEWVSSISGSGSDTLYADSVKGRFTISRDNAKTTLYLQMNSLRPEDTAVYYCTIGGSLSRSSQGTLVTVSSGGGGSGGGSEVQLVESGGGLVQPGGSLKLSCAASGFTFNKYAMNWVRQAPGKGLEWVARIRSKYNNYATYYADSVKDRFTISRDDSKNTAYLQMNNLKTEDTAVYYCVRHGNFGNSYISYWAYWGQGTLVTVSSGGGGSGGGGSGGGGSQTVVTQEPSLTVSPGGTVTLTCGSSTGAVTSGNYPNWVQQKPGQAPRGLIGGTKFLAPGTPARFSGSLLGGKAALTLSGVQPEDEAEYYCVLWYSNRWVFGGGTKLTVLHHHHHH

SEQ ID NO: 3373 - protein, 505 aa, synthetic construct
  REGION 1..505: note = Description of Artificial Sequence: Synthetic polypeptide
QVQLVESGGGLVQAGGSLRLSCVASGRTSTIDTMYWHRQAPGNERELVAYVTSRGTSNVADSVKGRFTISRDNAKNTAYLQMNSLKPEDTAVYYCSVRTTSYPVDFWGQGTQVTVSSGGGGSGGGSEVQLVESGGGLVQPGNSLRLSCAASGFTFSSFGMSWVRQAPGKGLEWVSSISGSGSDTLYADSVKGRFTISRDNAKTTLYLQMNSLRPEDTAVYYCTIGGSLSRSSQGTLVTVSSGGGGSGGGSEVQLVESGGGLVQPGGSLKLSCAASGFTFNKYAMNWVRQAPGKGLEWVARIRSKYNNYATYYADSVKDRFTISRDDSKNTAYLQMNNLKTEDTAVYYCVRHGNFGNSYISYWAYWGQGTLVTVSSGGGGSGGGGSGGGGSQTVVTQEPSLTVSPGGTVTLTCGSSTGAVTSGNYPNWVQQKPGQAPRGLIGGTKFLAPGTPARFSGSLLGGKAALTLSGVQPEDEAEYYCVLWYSNRWVFGGGTKLTVLHHHHHH

SEQ ID NO: 3374 - protein, 507 aa, synthetic construct
  REGION 1..507: note = Description of Artificial Sequence: Synthetic polypeptide
QVQLVESGGGLVQAGGSLRLSCAASGSTSSINTMYWYRQAPGKERELVAFISSGGSTNVRDSVKGRFSVSRDSAKNIVYLQMNSLKPEDTAVYYCNTYIPYGGTLHDFWGQGTQVTVSSGGGGSGGGSEVQLVESGGGLVQPGNSLRLSCAASGFTFSSFGMSWVRQAPGKGLEWVSSISGSGSDTLYADSVKGRFTISRDNAKTTLYLQMNSLRPEDTAVYYCTIGGSLSRSSQGTLVTVSSGGGGSGGGSEVQLVESGGGLVQPGGSLKLSCAASGFTFNKYAMNWVRQAPGKGLEWVARIRSKYNNYATYYADSVKDRFTISRDDSKNTAYLQMNNLKTEDTAVYYCVRHGNFGNSYISYWAYWGQGTLVTVSSGGGGSGGGGSGGGGSQTVVTQEPSLTVSPGGTVTLTCGSSTGAVTSGNYPNWVQQKPGQAPRGLIGGTKFLAPGTPARFSGSLLGGKAALTLSGVQPEDEAEYYCVLWYSNRWVFGGGTKLTVLHHHHHH

SEQ ID NO: 3375 - protein, 499 aa, synthetic construct
  REGION 1..499: note = Description of Artificial Sequence: Synthetic polypeptide
QVQLVESGGGLVQPGGSLRLSCAASGGDWSANFMYWYRQAPGKQRELVARISGRGVVDYVESVKGRFTISRDNAKNTVYLQMNSLKPEDTAVYYCAVASYWGQGTQVTVSSGGGGSGGGSEVQLVESGGGLVQPGNSLRLSCAASGFTFSSFGMSWVRQAPGKGLEWVSSISGSGSDTLYADSVKGRFTISRDNAKTTLYLQMNSLRPEDTAVYYCTIGGSLSRSSQGTLVTVSSGGGGSGGGSEVQLVESGGGLVQPGGSLKLSCAASGFTFNKYAMNWVRQAPGKGLEWVARIRSKYNNYATYYADSVKDRFTISRDDSKNTAYLQMNNLKTEDTAVYYCVRHGNFGNSYISYWAYWGQGTLVTVSSGGGGSGGGGSGGGGSQTVVTQEPSLTVSPGGTVTLTCGSSTGAVTSGNYPNWVQQKPGQAPRGLIGGTKFLAPGTPARFSGSLLGGKAALTLSGVQPEDEAEYYCVLWYSNRWVFGGGTKLTVLHHHHHH

SEQ ID NO: 3376 - protein, 504 aa, synthetic construct
  REGION 1..504: note = Description of Artificial Sequence: Synthetic polypeptide
QVQLVESGGGVVQAGGSLTLSCAASGSTFSIRAMRWYRQAPGTERDLVAVIYGSSTYYADAVKGRFTISRDNSKNTLYLQMNSLRAEDTAVYYCNADTIGTARDYWGQGTLVTVSSGGGGSGGGSEVQLVESGGGLVQPGNSLRLSCAASGFTFSKFGMSWVRQAPGKGLEWVSSISGSGRDTLYADSVKGRFTISRDNAKTTLYLQMNSLRPEDTAVYYCTIGGSLSVSSQGTLVTVSSGGGGSGGGSEVQLVESGGGLVQPGGSLKLSCAASGFTFNKYAINWVRQAPGKGLEWVARIRSKYNNYATYYADQVKDRFTISRDDSKNTAYLQMNNLKTEDTAVYYCVRHANFGNSYISYWAYWGQGTLVTVSSGGGGSGGGGSGGGGSQTVVTQEPSLTVSPGGTVTLTCASSTGAVTSGNYPNWVQQKPGQAPRGLIGGTKFLVPGTPARFSGSLLGGKAALTLSGVQPEDEAEYYCTLWYSNRWVFGGGTKLTVLHHHHHH

SEQ ID NO: 3377 - protein, 503 aa, synthetic construct
  REGION 1..503: note = Description of Artificial Sequence: Synthetic polypeptide
QVQLVESGGALVQPGGSLRLSCAASGFPVNRYSMRWYRQAPGKEREWVAGMSSAGDRSSYEDSVKGRFTISRDDARNTVYLQMNSLKPEDTAVYYCNVNVGFEYWGQGTQVTVSSGGGGSGGGSEVQLVESGGGLVQPGNSLRLSCAASGFTFSKFGMSWVRQAPGKGLEWVSSISGSGRDTLYADSVKGRFTISRDNAKTTLYLQMNSLRPEDTAVYYCTIGGSLSVSSQGTLVTVSSGGGGSGGGSEVQLVESGGGLVQPGGSLKLSCAASGFTFNKYAINWVRQAPGKGLEWVARIRSKYNNYATYYADQVKDRFTISRDDSKNTAYLQMNNLKTEDTAVYYCVRHANFGNSYISYWAYWGQGTLVTVSSGGGGSGGGGSGGGGSQTVVTQEPSLTVSPGGTVTLTCASSTGAVTSGNYPNWVQQKPGQAPRGLIGGTKFLVPGTPARFSGSLLGGKAALTLSGVQPEDEAEYYCTLWYSNRWVFGGGTKLTVLHHHHHH

SEQ ID NO: 3378 - protein, 504 aa, synthetic construct
  REGION 1..504: note = Description of Artificial Sequence: Synthetic polypeptide
QVQLVESGGGVVQAGGSLRLSCAASGSTFSIRAMRWYRQAPGTERDLVAVIYGSSTYYADAVKGRFTISRDNSKNTLYLQMNSLRAEDTAVYYCNADTIGTARDYWGQGTLVTVSSGGGGSGGGSEVQLVESGGGLVQPGNSLRLSCAASGFTFSKFGMSWVRQAPGKGLEWVSSISGSGRDTLYADSVKGRFTISRDNAKTTLYLQMNSLRPEDTAVYYCTIGGSLSVSSQGTLVTVSSGGGGSGGGSEVQLVESGGGLVQPGGSLKLSCAASGNTFNKYAMNWVRQAPGKGLEWVARIRSKYNNYATYYADSVKDRFTISRDDSKNTAYLQMNNLKTEDTAVYYCVRHGNFGDSYISYWAYWGQGTLVTVSSGGGGSGGGGSGGGGSQTVVTQEPSLTVSPGGTVTLTCGSSTGAVTHGNYPNWVQQKPGQAPRGLIGGTKVLAPGTPARFSGSLLGGKAALTLSGVQPEDEAEYYCVLWYSNRWVFGGGTKLTVLHHHHHH

SEQ ID NO: 3379 - protein, 504 aa, synthetic construct
  REGION 1..504: note = Description of Artificial Sequence: Synthetic polypeptide
QVQLVESGGGVVQAGGSLRLSCAASGSTFSIRAMRWYRQAPGTERDLVAVIYGSSTYYADAVKGRFTISRDNSKNTLYLQMNSLRAEDTAVYYCNADTIGTARDYWGQGTLVTVSSGGGGSGGGSEVQLVESGGGLVQPGNSLRLSCAASGFTFSKFGMSWVRQAPGKGLEWVSSISGSGRDTLYADSVKGRFTISRDNAKTTLYLQMNSLRPEDTAVYYCTIGGSLSVSSQGTLVTVSSGGGGSGGGSEVQLVESGGGLVQPGGSLKLSCAASGFTFNKYAINWVRQAPGKGLEWVARIRSKYNNYATYYADQVKDRFTISRDDSKNTAYLQMNNLKTEDTAVYYCVRHANFGNSYISYWAYWGQGTLVTVSSGGGGSGGGGSGGGGSQTVVTQEPSLTVSPGGTVTLTCASSTGAVTSGNYPNWVQQKPGQAPRGLIGGTKFLVPGTPARFSGSLLGGKAALTLSGVQPEDEAEYYCTLWYSNRWVFGGGTKLTVLHHHHHH

SEQ ID NO: 3380 - protein, 509 aa, synthetic construct
  REGION 1..509: note = Description of Artificial Sequence: Synthetic polypeptide
QVQLQESGGGLVQAGGSLRLSCAASGSIAYIYTMDWYRQAPGKQRELVATSTRDGNVDYAESVKGRFTISRDNAKNTVYLQMNSLKPEDTAVYYCNADLRTAVDLIRANYWGQGTQVTVSSGGGGSGGGSEVQLVESGGGLVQPGNSLRLSCAASGFTFSKFGMSWVRQAPGKGLEWVSSISGSGRDTLYADSVKGRFTISRDNAKTTLYLQMNSLRPEDTAVYYCTIGGSLSVSSQGTLVTVSSGGGGSGGGSEVQLVESGGGLVQPGGSLKLSCAASGFTFNKYAINWVRQAPGKGLEWVARIRSKYNNYATYYADQVKDRFTISRDDSKNTAYLQMNNLKTEDTAVYYCVRHANFGNSYISYWAYWGQGTLVTVSSGGGGSGGGGSGGGGSQTVVTQEPSLTVSPGGTVTLTCASSTGAVTSGNYPNWVQQKPGQAPRGLIGGTKFLVPGTPARFSGSLLGGKAALTLSGVQPEDEAEYYCTLWYSNRWVFGGGTKLTVLHHHHHH

SEQ ID NO: 3381 - protein, 513 aa, synthetic construct
  REGION 1..513: note = Description of Artificial Sequence: Synthetic polypeptide
QVQLQESGGGLVQAGDSLRLSCVVSGRTDSWYVMGWFRQAPGKDREFVAGVSWSYGNTYYADSVKGRFTASRDNAKNTAYLQMNSLNAEDTAVYYCAARVSREVIPTRWDLYNYWGQGTQVTVSSGGGGSGGGSEVQLVESGGGLVQPGNSLRLSCAASGFTFSKFGMSWVRQAPGKGLEWVSSISGSGRDTLYADSVKGRFTISRDNAKTTLYLQMNSLRPEDTAVYYCTIGGSLSVSSQGTLVTVSSGGGGSGGGSEVQLVESGGGLVQPGGSLKLSCAASGFTFNKYAINWVRQAPGKGLEWVARIRSKYNNYATYYADQVKDRFTISRDDSKNTAYLQMNNLKTEDTAVYYCVRHANFGNSYISYWAYWGQGTLVTVSSGGGGSGGGGSGGGGSQTVVTQEPSLTVSPGGTVTLTCASSTGAVTSGNYPNWVQQKPGQAPRGLIGGTKFLVPGTPARFSGSLLGGKAALTLSGVQPEDEAEYYCTLWYSNRWVFGGGTKLTVLHHHHHH

SEQ ID NO: 3382 - protein, 502 aa, synthetic construct
  REGION 1..502: note = Description of Artificial Sequence: Synthetic polypeptide
QVQLQESGGGSVQPGGSLRVSCVVSRTIISINAMTWYHQAPGKRRELVAIITSGGETNYADSVKGRFTISRDNAKNTAYLQMNNLKPEDTGVYYCNVVPPLGSWGQGTQVTVSSGGGGSGGGSEVQLVESGGGLVQPGNSLRLSCAASGFTFSKFGMSWVRQAPGKGLEWVSSISGSGRDTLYADSVKGRFTISRDNAKTTLYLQMNSLRPEDTAVYYCTIGGSLSVSSQGTLVTVSSGGGGSGGGSEVQLVESGGGLVQPGGSLKLSCAASGFTFNKYAINWVRQAPGKGLEWVARIRSKYNNYATYYADQVKDRFTISRDDSKNTAYLQMNNLKTEDTAVYYCVRHANFGNSYISYWAYWGQGTLVTVSSGGGGSGGGGSGGGGSQTVVTQEPSLTVSPGGTVTLTCASSTGAVTSGNYPNWVQQKPGQAPRGLIGGTKFLVPGTPARFSGSLLGGKAALTLSGVQPEDEAEYYCTLWYSNRWVFGGGTKLTVLHHHHHH

SEQ ID NO: 3383 - protein, 515 aa, synthetic construct
  REGION 1..515: note = Description of Artificial Sequence: Synthetic polypeptide
QVQLQESGGGRVQAGGSLRLSCSASARTLRLYAVGWFRQAPGKEREFVAGIGRSERTYYTDSVKGRFTLSRDNAKNTVFLEMNDLEPEDTAVYFCALTFQTTDMVDVPTTQHEYDYWGRGTQVTVSSGGGGSGGGSEVQLVESGGGLVQPGNSLRLSCAASGFTFSKFGMSWVRQAPGKGLEWVSSISGSGRDTLYADSVKGRFTISRDNAKTTLYLQMNSLRPEDTAVYYCTIGGSLSVSSQGTLVTVSSGGGGSGGGSEVQLVESGGGLVQPGGSLKLSCAASGFTFNKYAINWVRQAPGKGLEWVARIRSKYNNYATYYADQVKDRFTISRDDSKNTAYLQMNNLKTEDTAVYYCVRHANFGNSYISYWAYWGQGTLVTVSSGGGGSGGGGSGGGGSQTVVTQEPSLTVSPGGTVTLTCASSTGAVTSGNYPNWVQQKPGQAPRGLIGGTKFLVPGTPARFSGSLLGGKAALTLSGVQPEDEAEYYCTLWYSNRWVFGGGTKLTVLHHHHHH

SEQ ID NO: 3384 - protein, 509 aa, synthetic construct
  REGION 1..509: note = Description of Artificial Sequence: Synthetic polypeptide
QVQLQESGGGLVQAGGSLRLSCAASGSIAYIYTMDWYRQAPGKQRELVATSTHDGNTDYADSVKGRFTISRDNVKNTVYLQMNSLKPEDTAVYYCNADLRTAVDLIRANYWGQGTQVTVSSGGGGSGGGSEVQLVESGGGLVQPGNSLRLSCAASGFTFSKFGMSWVRQAPGKGLEWVSSISGSGRDTLYADSVKGRFTISRDNAKTTLYLQMNSLRPEDTAVYYCTIGGSLSVSSQGTLVTVSSGGGGSGGGSEVQLVESGGGLVQPGGSLKLSCAASGFTFNKYAINWVRQAPGKGLEWVARIRSKYNNYATYYADQVKDRFTISRDDSKNTAYLQMNNLKTEDTAVYYCVRHANFGNSYISYWAYWGQGTLVTVSSGGGGSGGGGSGGGGSQTVVTQEPSLTVSPGGTVTLTCASSTGAVTSGNYPNWVQQKPGQAPRGLIGGTKFLVPGTPARFSGSLLGGKAALTLSGVQPEDEAEYYCTLWYSNRWVFGGGTKLTVLHHHHHH

SEQ ID NO: 3385 - protein, 499 aa, synthetic construct
  REGION 1..499: note = Description of Artificial Sequence: Synthetic polypeptide
QVQLQESGGGLVQAGGSLRLSCAASGVTFSINYIDWYRQAPGKQREWVAQITRDSNSFYADSVKGRFAISRDNAKNTVYLQMNNLKPEDTAVYYCRVLSYWGQGTQVTVSSGGGGSGGGSEVQLVESGGGLVQPGNSLRLSCAASGFTFSKFGMSWVRQAPGKGLEWVSSISGSGRDTLYADSVKGRFTISRDNAKTTLYLQMNSLRPEDTAVYYCTIGGSLSVSSQGTLVTVSSGGGGSGGGSEVQLVESGGGLVQPGGSLKLSCAASGFTFNKYAINWVRQAPGKGLEWVARIRSKYNNYATYYADQVKDRFTISRDDSKNTAYLQMNNLKTEDTAVYYCVRHANFGNSYISYWAYWGQGTLVTVSSGGGGSGGGGSGGGGSQTVVTQEPSLTVSPGGTVTLTCASSTGAVTSGNYPNWVQQKPGQAPRGLIGGTKFLVPGTPARFSGSLLGGKAALTLSGVQPEDEAEYYCTLWYSNRWVFGGGTKLTVLHHHHHH

SEQ ID NO: 3386 - protein, 499 aa, synthetic construct
  REGION 1..499: note = Description of Artificial Sequence: Synthetic polypeptide
QVQLQESGGGLVQAGGSLRLSCEASGPTFSINYIDWYRQAPGKQREWVAQITRDSNSFYADSVKGRFAVSRDNAKNTVYLQMNSLKPEDTAVYYCRVLSYWGQGTQVTVSSGGGGSGGGSEVQLVESGGGLVQPGNSLRLSCAASGFTFSKFGMSWVRQAPGKGLEWVSSISGSGRDTLYADSVKGRFTISRDNAKTTLYLQMNSLRPEDTAVYYCTIGGSLSVSSQGTLVTVSSGGGGSGGGSEVQLVESGGGLVQPGGSLKLSCAASGFTFNKYAINWVRQAPGKGLEWVARIRSKYNNYATYYADQVKDRFTISRDDSKNTAYLQMNNLKTEDTAVYYCVRHANFGNSYISYWAYWGQGTLVTVSSGGGGSGGGGSGGGGSQTVVTQEPSLTVSPGGTVTLTCASSTGAVTSGNYPNWVQQKPGQAPRGLIGGTKFLVPGTPARFSGSLLGGKAALTLSGVQPEDEAEYYCTLWYSNRWVFGGGTKLTVLHHHHHH

SEQ ID NO: 3387 - protein, 499 aa, synthetic construct
  REGION 1..499: note = Description of Artificial Sequence: Synthetic polypeptide
QVQLQESGGGLVQAGGSLRLSCAASGVTFSINYIDWYRQAPGKQREWVAQITRDSNSFYADSVKGRFAISRDNAKNTVYLQMNSLKPEDTAVYYCRVLSYWGQGTQVTVSSGGGGSGGGSEVQLVESGGGLVQPGNSLRLSCAASGFTFSKFGMSWVRQAPGKGLEWVSSISGSGRDTLYADSVKGRFTISRDNAKTTLYLQMNSLRPEDTAVYYCTIGGSLSVSSQGTLVTVSSGGGGSGGGSEVQLVESGGGLVQPGGSLKLSCAASGFTFNKYAINWVRQAPGKGLEWVARIRSKYNNYATYYADQVKDRFTISRDDSKNTAYLQMNNLKTEDTAVYYCVRHANFGNSYISYWAYWGQGTLVTVSSGGGGSGGGGSGGGGSQTVVTQEPSLTVSPGGTVTLTCASSTGAVTSGNYPNWVQQKPGQAPRGLIGGTKFLVPGTPARFSGSLLGGKAALTLSGVQPEDEAEYYCTLWYSNRWVFGGGTKLTVLHHHHHH

SEQ ID NO: 3388 - protein, 499 aa, synthetic construct
  REGION 1..499: note = Description of Artificial Sequence: Synthetic polypeptide
QVQLQESGGGLVQAGGSLRLSCAASGSTFSRNYIDWYRQAPGKQREWVAQITSGGNTHYEPSLKGRFTISRDNAKNTAYLQMNSLKPEDTAVYYCRILDYWGQGTQVTVSSGGGGSGGGSEVQLVESGGGLVQPGNSLRLSCAASGFTFSKFGMSWVRQAPGKGLEWVSSISGSGRDTLYADSVKGRFTISRDNAKTTLYLQMNSLRPEDTAVYYCTIGGSLSVSSQGTLVTVSSGGGGSGGGSEVQLVESGGGLVQPGGSLKLSCAASGFTFNKYAINWVRQAPGKGLEWVARIRSKYNNYATYYADQVKDRFTISRDDSKNTAYLQMNNLKTEDTAVYYCVRHANFGNSYISYWAYWGQGTLVTVSSGGGGSGGGGSGGGGSQTVVTQEPSLTVSPGGTVTLTCASSTGAVTSGNYPNWVQQKPGQAPRGLIGGTKFLVPGTPARFSGSLLGGKAALTLSGVQPEDEAEYYCTLWYSNRWVFGGGTKLTVLHHHHHH

SEQ ID NO: 3389 - protein, 499 aa, synthetic construct
  REGION 1..499: note = Description of Artificial Sequence: Synthetic polypeptide
QVQLQESGGGLVQAGGSLRLSCAASGVTFSASYIDWYRQAPGNEREWVAQITRGGDSFYADSVKGRFAISRDNAKNTVYLQMNSLKPEDTAVYYCRVLSYWGQGTQVTVSSGGGGSGGGSEVQLVESGGGLVQPGNSLRLSCAASGFTFSKFGMSWVRQAPGKGLEWVSSISGSGRDTLYADSVKGRFTISRDNAKTTLYLQMNSLRPEDTAVYYCTIGGSLSVSSQGTLVTVSSGGGGSGGGSEVQLVESGGGLVQPGGSLKLSCAASGFTFNKYAINWVRQAPGKGLEWVARIRSKYNNYATYYADQVKDRFTISRDDSKNTAYLQMNNLKTEDTAVYYCVRHANFGNSYISYWAYWGQGTLVTVSSGGGGSGGGGSGGGGSQTVVTQEPSLTVSPGGTVTLTCASSTGAVTSGNYPNWVQQKPGQAPRGLIGGTKFLVPGTPARFSGSLLGGKAALTLSGVQPEDEAEYYCTLWYSNRWVFGGGTKLTVLHHHHHH

SEQ ID NO: 3390 - protein, 499 aa, synthetic construct
  REGION 1..499: note = Description of Artificial Sequence: Synthetic polypeptide
QVQLQESGGGLVQAGGSLRLSCAASGSTFNNYAMDWFRQAPGKQREWVAQITRDSSSFYADSVKGRFAISRDNAKNTVYLQMNSLKPEDTAVYYCRVLSYWGQGTQVTVSSGGGGSGGGSEVQLVESGGGLVQPGNSLRLSCAASGFTFSKFGMSWVRQAPGKGLEWVSSISGSGRDTLYADSVKGRFTISRDNAKTTLYLQMNSLRPEDTAVYYCTIGGSLSVSSQGTLVTVSSGGGGSGGGSEVQLVESGGGLVQPGGSLKLSCAASGFTFNKYAINWVRQAPGKGLEWVARIRSKYNNYATYYADQVKDRFTISRDDSKNTAYLQMNNLKTEDTAVYYCVRHANFGNSYISYWAYWGQGTLVTVSSGGGGSGGGGSGGGGSQTVVTQEPSLTVSPGGTVTLTCASSTGAVTSGNYPNWVQQKPGQAPRGLIGGTKFLVPGTPARFSGSLLGGKAALTLSGVQPEDEAEYYCTLWYSNRWVFGGGTKLTVLHHHHHH

SEQ ID NO: 3391 - protein, 499 aa, synthetic construct
  REGION 1..499: note = Description of Artificial Sequence: Synthetic polypeptide
QVQLQESGGGLVQAGGSLRLSCAASGVTFSINYIDWYRQAPGKQREWVAQITRDSNSFYADSVKGRFAISRDNAKNTVYLQMNSLKPEDTAVYYCRLLSYWGQGTQVTVSSGGGGSGGGSEVQLVESGGGLVQPGNSLRLSCAASGFTFSKFGMSWVRQAPGKGLEWVSSISGSGRDTLYADSVKGRFTISRDNAKTTLYLQMNSLRPEDTAVYYCTIGGSLSVSSQGTLVTVSSGGGGSGGGSEVQLVESGGGLVQPGGSLKLSCAASGFTFNKYAINWVRQAPGKGLEWVARIRSKYNNYATYYADQVKDRFTISRDDSKNTAYLQMNNLKTEDTAVYYCVRHANFGNSYISYWAYWGQGTLVTVSSGGGGSGGGGSGGGGSQTVVTQEPSLTVSPGGTVTLTCASSTGAVTSGNYPNWVQQKPGQAPRGLIGGTKFLVPGTPARFSGSLLGGKAALTLSGVQPEDEAEYYCTLWYSNRWVFGGGTKLTVLHHHHHH

SEQ ID NO: 3392 - protein, 499 aa, synthetic construct
  REGION 1..499: note = Description of Artificial Sequence: Synthetic polypeptide
QVQLQESGGGLVQAGGSLRLSCAASGVTFSINYIDWYRQAPGKQREWVAQITRDDTSFYADSVKGRFAISRDNAKNTVYLQMNNLRPEDTAVYYCRLLSFWGQGTQVTVSSGGGGSGGGSEVQLVESGGGLVQPGNSLRLSCAASGFTFSKFGMSWVRQAPGKGLEWVSSISGSGRDTLYADSVKGRFTISRDNAKTTLYLQMNSLRPEDTAVYYCTIGGSLSVSSQGTLVTVSSGGGGSGGGSEVQLVESGGGLVQPGGSLKLSCAASGFTFNKYAINWVRQAPGKGLEWVARIRSKYNNYATYYADQVKDRFTISRDDSKNTAYLQMNNLKTEDTAVYYCVRHANFGNSYISYWAYWGQGTLVTVSSGGGGSGGGGSGGGGSQTVVTQEPSLTVSPGGTVTLTCASSTGAVTSGNYPNWVQQKPGQAPRGLIGGTKFLVPGTPARFSGSLLGGKAALTLSGVQPEDEAEYYCTLWYSNRWVFGGGTKLTVLHHHHHH

SEQ ID NO: 3393 - protein, 499 aa, synthetic construct
  REGION 1..499: note = Description of Artificial Sequence: Synthetic polypeptide
QVQLQESGGGLVQPGGSLRLSCAASGSTFGRNYIDWYRQAPGKQREWVAQITSGGNTHYEPSLKGRFTISRDNAKNTAYLQMNSLKPEDTAVYYCRILDYWGQGTQVTVSSGGGGSGGGSEVQLVESGGGLVQPGNSLRLSCAASGFTFSKFGMSWVRQAPGKGLEWVSSISGSGRDTLYADSVKGRFTISRDNAKTTLYLQMNSLRPEDTAVYYCTIGGSLSVSSQGTLVTVSSGGGGSGGGSEVQLVESGGGLVQPGGSLKLSCAASGFTFNKYAINWVRQAPGKGLEWVARIRSKYNNYATYYADQVKDRFTISRDDSKNTAYLQMNNLKTEDTAVYYCVRHANFGNSYISYWAYWGQGTLVTVSSGGGGSGGGGSGGGGSQTVVTQEPSLTVSPGGTVTLTCASSTGAVTSGNYPNWVQQKPGQAPRGLIGGTKFLVPGTPARFSGSLLGGKAALTLSGVQPEDEAEYYCTLWYSNRWVFGGGTKLTVLHHHHHH

SEQ ID NO: 3394 - protein, 499 aa, synthetic construct
  REGION 1..499: note = Description of Artificial Sequence: Synthetic polypeptide
QVQLQESGGGLVQAGGSLRLSCKASGVTFSINYIDWYRQAPGKQREWVAQITRDGSSFYADSVKGRFAISRDNAKNTVYLQMNSLKPEDTAVYYCRILSDWGQGTQVTVSSGGGGSGGGSEVQLVESGGGLVQPGNSLRLSCAASGFTFSKFGMSWVRQAPGKGLEWVSSISGSGRDTLYADSVKGRFTISRDNAKTTLYLQMNSLRPEDTAVYYCTIGGSLSVSSQGTLVTVSSGGGGSGGGSEVQLVESGGGLVQPGGSLKLSCAASGFTFNKYAINWVRQAPGKGLEWVARIRSKYNNYATYYADQVKDRFTISRDDSKNTAYLQMNNLKTEDTAVYYCVRHANFGNSYISYWAYWGQGTLVTVSSGGGGSGGGGSGGGGSQTVVTQEPSLTVSPGGTVTLTCASSTGAVTSGNYPNWVQQKPGQAPRGLIGGTKFLVPGTPARFSGSLLGGKAALTLSGVQPEDEAEYYCTLWYSNRWVFGGGTKLTVLHHHHHH

SEQ ID NO: 3395 - protein, 499 aa, synthetic construct
  REGION 1..499: note = Description of Artificial Sequence: Synthetic polypeptide
QVQLQESGGGLVQAGDSLRLSCAASGVTFSASYIDWYRQAPGNEREWVAQITRGGDSFYADSVKGRFAISRDNAKNTVYLQMNSLKPEDTAVYYCRVLSYWGQGTQVTVSSGGGGSGGGSEVQLVESGGGLVQPGNSLRLSCAASGFTFSKFGMSWVRQAPGKGLEWVSSISGSGRDTLYADSVKGRFTISRDNAKTTLYLQMNSLRPEDTAVYYCTIGGSLSVSSQGTLVTVSSGGGGSGGGSEVQLVESGGGLVQPGGSLKLSCAASGFTFNKYAINWVRQAPGKGLEWVARIRSKYNNYATYYADQVKDRFTISRDDSKNTAYLQMNNLKTEDTAVYYCVRHANFGNSYISYWAYWGQGTLVTVSSGGGGSGGGGSGGGGSQTVVTQEPSLTVSPGGTVTLTCASSTGAVTSGNYPNWVQQKPGQAPRGLIGGTKFLVPGTPARFSGSLLGGKAALTLSGVQPEDEAEYYCTLWYSNRWVFGGGTKLTVLHHHHHH

SEQ ID NO: 3396 - protein, 499 aa, synthetic construct
  REGION 1..499: note = Description of Artificial Sequence: Synthetic polypeptide
QVQLQESGGGLVQPGGSLRLSCAASGVTFSINYIDWYRQAPGKQREWVAQITRDSNSFYADSVKGRFAISRENAKNTVYLQMNSLKPEDTAVYYCRVLSYWGQGTQVTVSSGGGGSGGGSEVQLVESGGGLVQPGNSLRLSCAASGFTFSKFGMSWVRQAPGKGLEWVSSISGSGRDTLYADSVKGRFTISRDNAKTTLYLQMNSLRPEDTAVYYCTIGGSLSVSSQGTLVTVSSGGGGSGGGSEVQLVESGGGLVQPGGSLKLSCAASGFTFNKYAINWVRQAPGKGLEWVARIRSKYNNYATYYADQVKDRFTISRDDSKNTAYLQMNNLKTEDTAVYYCVRHANFGNSYISYWAYWGQGTLVTVSSGGGGSGGGGSGGGGSQTVVTQEPSLTVSPGGTVTLTCASSTGAVTSGNYPNWVQQKPGQAPRGLIGGTKFLVPGTPARFSGSLLGGKAALTLSGVQPEDEAEYYCTLWYSNRWVFGGGTKLTVLHHHHHH

SEQ ID NO: 3397 - protein, 499 aa, synthetic construct
  REGION 1..499: note = Description of Artificial Sequence: Synthetic polypeptide
QVQLQESGGGLVQAGGSLRLSCQASGVTFNINYIDWYRQAPGRQREWVAQITRDSTRFYADSVKGRFAISRDNAKNMVYLQLNSLKPEDTAVYYCRILSYWGQGTQVTVSSGGGGSGGGSEVQLVESGGGLVQPGNSLRLSCAASGFTFSKFGMSWVRQAPGKGLEWVSSISGSGRDTLYADSVKGRFTISRDNAKTTLYLQMNSLRPEDTAVYYCTIGGSLSVSSQGTLVTVSSGGGGSGGGSEVQLVESGGGLVQPGGSLKLSCAASGFTFNKYAINWVRQAPGKGLEWVARIRSKYNNYATYYADQVKDRFTISRDDSKNTAYLQMNNLKTEDTAVYYCVRHANFGNSYISYWAYWGQGTLVTVSSGGGGSGGGGSGGGGSQTVVTQEPSLTVSPGGTVTLTCASSTGAVTSGNYPNWVQQKPGQAPRGLIGGTKFLVPGTPARFSGSLLGGKAALTLSGVQPEDEAEYYCTLWYSNRWVFGGGTKLTVLHHHHHH

SEQ ID NO: 3398 - protein, 499 aa, synthetic construct
  REGION 1..499: note = Description of Artificial Sequence: Synthetic polypeptide
QVQLQESGGGLVQPGGSLRLSCAASGFDFSISYIDWYRQAPGNEREWVAQITRGGDSFYADSVKGRFAISRDNAKNTVYLQMNSLKPEDTAVYYCRILSYWGQGTQVTVSSGGGGSGGGSEVQLVESGGGLVQPGNSLRLSCAASGFTFSKFGMSWVRQAPGKGLEWVSSISGSGRDTLYADSVKGRFTISRDNAKTTLYLQMNSLRPEDTAVYYCTIGGSLSVSSQGTLVTVSSGGGGSGGGSEVQLVESGGGLVQPGGSLKLSCAASGFTFNKYAINWVRQAPGKGLEWVARIRSKYNNYATYYADQVKDRFTISRDDSKNTAYLQMNNLKTEDTAVYYCVRHANFGNSYISYWAYWGQGTLVTVSSGGGGSGGGGSGGGGSQTVVTQEPSLTVSPGGTVTLTCASSTGAVTSGNYPNWVQQKPGQAPRGLIGGTKFLVPGTPARFSGSLLGGKAALTLSGVQPEDEAEYYCTLWYSNRWVFGGGTKLTVLHHHHHH

SEQ ID NO: 3399 - protein, 499 aa, synthetic construct
  REGION 1..499: note = Description of Artificial Sequence: Synthetic polypeptide
QVQLQESGGGLVQAGGSLRLSCAASGSTFSRNYIDWYRQAPGKQREWVAQITSAGNTHYEPSLKGRFTISRDNAKNTAYLQMNSLKPEDTAVYYCRILDYWGQGTQVTVSSGGGGSGGGSEVQLVESGGGLVQPGNSLRLSCAASGFTFSKFGMSWVRQAPGKGLEWVSSISGSGRDTLYADSVKGRFTISRDNAKTTLYLQMNSLRPEDTAVYYCTIGGSLSVSSQGTLVTVSSGGGGSGGGSEVQLVESGGGLVQPGGSLKLSCAASGFTFNKYAINWVRQAPGKGLEWVARIRSKYNNYATYYADQVKDRFTISRDDSKNTAYLQMNNLKTEDTAVYYCVRHANFGNSYISYWAYWGQGTLVTVSSGGGGSGGGGSGGGGSQTVVTQEPSLTVSPGGTVTLTCASSTGAVTSGNYPNWVQQKPGQAPRGLIGGTKFLVPGTPARFSGSLLGGKAALTLSGVQPEDEAEYYCTLWYSNRWVFGGGTKLTVLHHHHHH

SEQ ID NO: 3400 - protein, 499 aa, synthetic construct
  REGION 1..499: note = Description of Artificial Sequence: Synthetic polypeptide
QVQLQESGGGLVQPGGSLRLSCAASGVTFSISYIDWYRQAPGNEREWVAQITRGGDSFYADSVKGRFAISRDNAKNTVYLQMNSLKPEDTAVYYCRILSYWGQGTQVTVSSGGGGSGGGSEVQLVESGGGLVQPGNSLRLSCAASGFTFSKFGMSWVRQAPGKGLEWVSSISGSGRDTLYADSVKGRFTISRDNAKTTLYLQMNSLRPEDTAVYYCTIGGSLSVSSQGTLVTVSSGGGGSGGGSEVQLVESGGGLVQPGGSLKLSCAASGFTFNKYAINWVRQAPGKGLEWVARIRSKYNNYATYYADQVKDRFTISRDDSKNTAYLQMNNLKTEDTAVYYCVRHANFGNSYISYWAYWGQGTLVTVSSGGGGSGGGGSGGGGSQTVVTQEPSLTVSPGGTVTLTCASSTGAVTSGNYPNWVQQKPGQAPRGLIGGTKFLVPGTPARFSGSLLGGKAALTLSGVQPEDEAEYYCTLWYSNRWVFGGGTKLTVLHHHHHH

SEQ ID NO: 3401 - protein, 499 aa, synthetic construct
  REGION 1..499: note = Description of Artificial Sequence: Synthetic polypeptide
QVQLQESGGGLVQAGGSLRLSCAASGVTFSINYIDWYRQAPGKQREWVAQITRDSNSFYADSVKGRFAVSRDNAKNTVYLQMNSLKPEDTAVYYCRVLSYWGQGTQVTVSSGGGGSGGGSEVQLVESGGGLVQPGNSLRLSCAASGFTFSKFGMSWVRQAPGKGLEWVSSISGSGRDTLYADSVKGRFTISRDNAKTTLYLQMNSLRPEDTAVYYCTIGGSLSVSSQGTLVTVSSGGGGSGGGSEVQLVESGGGLVQPGGSLKLSCAASGFTFNKYAINWVRQAPGKGLEWVARIRSKYNNYATYYADQVKDRFTISRDDSKNTAYLQMNNLKTEDTAVYYCVRHANFGNSYISYWAYWGQGTLVTVSSGGGGSGGGGSGGGGSQTVVTQEPSLTVSPGGTVTLTCASSTGAVTSGNYPNWVQQKPGQAPRGLIGGTKFLVPGTPARFSGSLLGGKAALTLSGVQPEDEAEYYCTLWYSNRWVFGGGTKLTVLHHHHHH

SEQ ID NO: 3402 - protein, 499 aa, synthetic construct
  REGION 1..499: note = Description of Artificial Sequence: Synthetic polypeptide
QVQLQESGGGLVQPGGSLTLSCAASGSTFSRNYIDWYRQAPGKQREWVAQITSGGNTHYEPSLKGRFTISRDNAKNTAYLQMNSLKPEDTAVYYCRILDYWGQGTQVTVSSGGGGSGGGSEVQLVESGGGLVQPGNSLRLSCAASGFTFSKFGMSWVRQAPGKGLEWVSSISGSGRDTLYADSVKGRFTISRDNAKTTLYLQMNSLRPEDTAVYYCTIGGSLSVSSQGTLVTVSSGGGGSGGGSEVQLVESGGGLVQPGGSLKLSCAASGFTFNKYAINWVRQAPGKGLEWVARIRSKYNNYATYYADQVKDRFTISRDDSKNTAYLQMNNLKTEDTAVYYCVRHANFGNSYISYWAYWGQGTLVTVSSGGGGSGGGGSGGGGSQTVVTQEPSLTVSPGGTVTLTCASSTGAVTSGNYPNWVQQKPGQAPRGLIGGTKFLVPGTPARFSGSLLGGKAALTLSGVQPEDEAEYYCTLWYSNRWVFGGGTKLTVLHHHHHH

SEQ ID NO: 3403 - protein, 499 aa, synthetic construct
  REGION 1..499: note = Description of Artificial Sequence: Synthetic polypeptide
QVQLQESGGGLVQAGGSLRLSCAASGSTFSKNYIDWYRQAPGKQREWVAQITSGGNTHYEPSLKGRFTISRDNAKNTAYLQMNSLKPEDTAVYYCRILDYWGQGTQVTVSSGGGGSGGGSEVQLVESGGGLVQPGNSLRLSCAASGFTFSKFGMSWVRQAPGKGLEWVSSISGSGRDTLYADSVKGRFTISRDNAKTTLYLQMNSLRPEDTAVYYCTIGGSLSVSSQGTLVTVSSGGGGSGGGSEVQLVESGGGLVQPGGSLKLSCAASGFTFNKYAINWVRQAPGKGLEWVARIRSKYNNYATYYADQVKDRFTISRDDSKNTAYLQMNNLKTEDTAVYYCVRHANFGNSYISYWAYWGQGTLVTVSSGGGGSGGGGSGGGGSQTVVTQEPSLTVSPGGTVTLTCASSTGAVTSGNYPNWVQQKPGQAPRGLIGGTKFLVPGTPARFSGSLLGGKAALTLSGVQPEDEAEYYCTLWYSNRWVFGGGTKLTVLHHHHHH

SEQ ID NO: 3404 - protein, 499 aa, synthetic construct
  REGION 1..499: note = Description of Artificial Sequence: Synthetic polypeptide
QVQLQESGGGLVQAGGSLRLSCAASGSTSSRNYIDWYRQAPGKQREWVAQITSGGNTHYEPSLKGRFTISRDNAKNTAYLQMNSLKPEDTAVYYCRILDYWGQGTQVTVSSGGGGSGGGSEVQLVESGGGLVQPGNSLRLSCAASGFTFSKFGMSWVRQAPGKGLEWVSSISGSGRDTLYADSVKGRFTISRDNAKTTLYLQMNSLRPEDTAVYYCTIGGSLSVSSQGTLVTVSSGGGGSGGGSEVQLVESGGGLVQPGGSLKLSCAASGFTFNKYAINWVRQAPGKGLEWVARIRSKYNNYATYYADQVKDRFTISRDDSKNTAYLQMNNLKTEDTAVYYCVRHANFGNSYISYWAYWGQGTLVTVSSGGGGSGGGGSGGGGSQTVVTQEPSLTVSPGGTVTLTCASSTGAVTSGNYPNWVQQKPGQAPRGLIGGTKFLVPGTPARFSGSLLGGKAALTLSGVQPEDEAEYYCTLWYSNRWVFGGGTKLTVLHHHHHH

SEQ ID NO: 3405 - protein, 499 aa, synthetic construct
  REGION 1..499: note = Description of Artificial Sequence: Synthetic polypeptide
QVQLQESGGGLVQAGGSLRLSCSASGSTFSRNYIDWYRQAPGKQREWVAQITSGGNTHYEPSLKGRFTISRDNAKNTAYLQMNSLKPEDTAVYYCRILDYWGQGTQVTVSSGGGGSGGGSEVQLVESGGGLVQPGNSLRLSCAASGFTFSKFGMSWVRQAPGKGLEWVSSISGSGRDTLYADSVKGRFTISRDNAKTTLYLQMNSLRPEDTAVYYCTIGGSLSVSSQGTLVTVSSGGGGSGGGSEVQLVESGGGLVQPGGSLKLSCAASGFTFNKYAINWVRQAPGKGLEWVARIRSKYNNYATYYADQVKDRFTISRDDSKNTAYLQMNNLKTEDTAVYYCVRHANFGNSYISYWAYWGQGTLVTVSSGGGGSGGGGSGGGGSQTVVTQEPSLTVSPGGTVTLTCASSTGAVTSGNYPNWVQQKPGQAPRGLIGGTKFLVPGTPARFSGSLLGGKAALTLSGVQPEDEAEYYCTLWYSNRWVFGGGTKLTVLHHHHHH

SEQ ID NO: 3406 - protein, 499 aa, synthetic construct
  REGION 1..499: note = Description of Artificial Sequence: Synthetic polypeptide
QVQLQESGGGLVQPGDPLRLSCAASGSTFSRNYIDWYRQAPGKQREWVAQITSGGNTHYEPSLKGRFTISRDNAKNTAYLQMNSLKPEDTAVYYCRILDYWGQGTQVTVSSGGGGSGGGSEVQLVESGGGLVQPGNSLRLSCAASGFTFSKFGMSWVRQAPGKGLEWVSSISGSGRDTLYADSVKGRFTISRDNAKTTLYLQMNSLRPEDTAVYYCTIGGSLSVSSQGTLVTVSSGGGGSGGGSEVQLVESGGGLVQPGGSLKLSCAASGFTFNKYAINWVRQAPGKGLEWVARIRSKYNNYATYYADQVKDRFTISRDDSKNTAYLQMNNLKTEDTAVYYCVRHANFGNSYISYWAYWGQGTLVTVSSGGGGSGGGGSGGGGSQTVVTQEPSLTVSPGGTVTLTCASSTGAVTSGNYPNWVQQKPGQAPRGLIGGTKFLVPGTPARFSGSLLGGKAALTLSGVQPEDEAEYYCTLWYSNRWVFGGGTKLTVLHHHHHH

SEQ ID NO: 3407 - protein, 513 aa, synthetic construct
  REGION 1..513: note = Description of Artificial Sequence: Synthetic polypeptide
QVQLQESGGGLVQAGGSLRLSCAVSGRTFSGFGTGWFRQAPGKEREFVAAISWAGGRTHYEDSVKGRFTIHRDNAKNTVYLQMNSLKPEDTAVYYCAAQVSRAYDGIWYSGGDYWGQGTQVTVSSGGGGSGGGSEVQLVESGGGLVQPGNSLRLSCAASGFTFSKFGMSWVRQAPGKGLEWVSSISGSGRDTLYADSVKGRFTISRDNAKTTLYLQMNSLRPEDTAVYYCTIGGSLSVSSQGTLVTVSSGGGGSGGGSEVQLVESGGGLVQPGGSLKLSCAASGFTFNKYAINWVRQAPGKGLEWVARIRSKYNNYATYYADQVKDRFTISRDDSKNTAYLQMNNLKTEDTAVYYCVRHANFGNSYISYWAYWGQGTLVTVSSGGGGSGGGGSGGGGSQTVVTQEPSLTVSPGGTVTLTCASSTGAVTSGNYPNWVQQKPGQAPRGLIGGTKFLVPGTPARFSGSLLGGKAALTLSGVQPEDEAEYYCTLWYSNRWVFGGGTKLTVLHHHHHH

SEQ ID NO: 3408 - protein, 513 aa, synthetic construct
  REGION 1..513: note = Description of Artificial Sequence: Synthetic polypeptide
QVQLQESGGGLVQAGGSLRLSCAVSGRTFSGFGTGWFRQAPGKEREFVAAISWDGGRTHYADFVKGRFTISRDNAKNTVYLQMNSLKPEDTAVYYCAAQVARAYDSKWYSGGDYWGQGTQVTVSSGGGGSGGGSEVQLVESGGGLVQPGNSLRLSCAASGFTFSKFGMSWVRQAPGKGLEWVSSISGSGRDTLYADSVKGRFTISRDNAKTTLYLQMNSLRPEDTAVYYCTIGGSLSVSSQGTLVTVSSGGGGSGGGSEVQLVESGGGLVQPGGSLKLSCAASGFTFNKYAINWVRQAPGKGLEWVARIRSKYNNYATYYADQVKDRFTISRDDSKNTAYLQMNNLKTEDTAVYYCVRHANFGNSYISYWAYWGQGTLVTVSSGGGGSGGGGSGGGGSQTVVTQEPSLTVSPGGTVTLTCASSTGAVTSGNYPNWVQQKPGQAPRGLIGGTKFLVPGTPARFSGSLLGGKAALTLSGVQPEDEAEYYCTLWYSNRWVFGGGTKLTVLHHHHHH

SEQ ID NO: 3409 - protein, 513 aa, synthetic construct
  REGION 1..513: note = Description of Artificial Sequence: Synthetic polypeptide
QVQLQESGGGLVQAGGSLRLSCAVSGRTFSGFGTGWFRQAPGKEREFVAAISWVGGRTHYADSVKGRFTISRDNAKNTVYLQMNSLKPEDTAVYYCAAQVARAYDGNWYSGGDYWGQGTQVTVSSGGGGSGGGSEVQLVESGGGLVQPGNSLRLSCAASGFTFSKFGMSWVRQAPGKGLEWVSSISGSGRDTLYADSVKGRFTISRDNAKTTLYLQMNSLRPEDTAVYYCTIGGSLSVSSQGTLVTVSSGGGGSGGGSEVQLVESGGGLVQPGGSLKLSCAASGFTFNKYAINWVRQAPGKGLEWVARIRSKYNNYATYYADQVKDRFTISRDDSKNTAYLQMNNLKTEDTAVYYCVRHANFGNSYISYWAYWGQGTLVTVSSGGGGSGGGGSGGGGSQTVVTQEPSLTVSPGGTVTLTCASSTGAVTSGNYPNWVQQKPGQAPRGLIGGTKFLVPGTPARFSGSLLGGKAALTLSGVQPEDEAEYYCTLWYSNRWVFGGGTKLTVLHHHHHH

SEQ ID NO: 3410 - protein, 513 aa, synthetic construct
  REGION 1..513: note = Description of Artificial Sequence: Synthetic polypeptide
QVQLQESGGGLVQAGGSLRLSCAVSGRTFSGFGTGWFRQAPGKEREFVAAISWSGGRTHYADSVKGRFTISRDNAKNTVYLQMNSLKPEDTAVYYCAGQVARAYDGNWYSRGDYWGQGTQVTVSSGGGGSGGGSEVQLVESGGGLVQPGNSLRLSCAASGFTFSKFGMSWVRQAPGKGLEWVSSISGSGRDTLYADSVKGRFTISRDNAKTTLYLQMNSLRPEDTAVYYCTIGGSLSVSSQGTLVTVSSGGGGSGGGSEVQLVESGGGLVQPGGSLKLSCAASGFTFNKYAINWVRQAPGKGLEWVARIRSKYNNYATYYADQVKDRFTISRDDSKNTAYLQMNNLKTEDTAVYYCVRHANFGNSYISYWAYWGQGTLVTVSSGGGGSGGGGSGGGGSQTVVTQEPSLTVSPGGTVTLTCASSTGAVTSGNYPNWVQQKPGQAPRGLIGGTKFLVPGTPARFSGSLLGGKAALTLSGVQPEDEAEYYCTLWYSNRWVFGGGTKLTVLHHHHHH

SEQ ID NO: 3411 - protein, 513 aa, synthetic construct
  REGION 1..513: note = Description of Artificial Sequence: Synthetic polypeptide
QVQLQESGGGSVQAGGSLRLSCAFSGRTFSGFGTGWFRQAPEKEREFVAAISWDGGRTHYADSVKGRFTISRDNAKNTVYLQMDSLKPEDTAIYYCAAQVSRAYDGRWYSAVDYWGRGTQVTVSSGGGGSGGGSEVQLVESGGGLVQPGNSLRLSCAASGFTFSKFGMSWVRQAPGKGLEWVSSISGSGRDTLYADSVKGRFTISRDNAKTTLYLQMNSLRPEDTAVYYCTIGGSLSVSSQGTLVTVSSGGGGSGGGSEVQLVESGGGLVQPGGSLKLSCAASGFTFNKYAINWVRQAPGKGLEWVARIRSKYNNYATYYADQVKDRFTISRDDSKNTAYLQMNNLKTEDTAVYYCVRHANFGNSYISYWAYWGQGTLVTVSSGGGGSGGGGSGGGGSQTVVTQEPSLTVSPGGTVTLTCASSTGAVTSGNYPNWVQQKPGQAPRGLIGGTKFLVPGTPARFSGSLLGGKAALTLSGVQPEDEAEYYCTLWYSNRWVFGGGTKLTVLHHHHHH

SEQ ID NO: 3412 - protein, 513 aa, synthetic construct
  REGION 1..513: note = Description of Artificial Sequence: Synthetic polypeptide
QVQLQESGGGLVQAGGSLRLSCAVSGRTFSGFGTGWFRQAPGKEREFVAAISWSGGTTHYADSVKGRFTISRDNAKNTVYLQMNSLKPEDTAVYYCAGQVARAYDSSWYSRGDYWGQGTQVTVSSGGGGSGGGSEVQLVESGGGLVQPGNSLRLSCAASGFTFSKFGMSWVRQAPGKGLEWVSSISGSGRDTLYADSVKGRFTISRDNAKTTLYLQMNSLRPEDTAVYYCTIGGSLSVSSQGTLVTVSSGGGGSGGGSEVQLVESGGGLVQPGGSLKLSCAASGFTFNKYAINWVRQAPGKGLEWVARIRSKYNNYATYYADQVKDRFTISRDDSKNTAYLQMNNLKTEDTAVYYCVRHANFGNSYISYWAYWGQGTLVTVSSGGGGSGGGGSGGGGSQTVVTQEPSLTVSPGGTVTLTCASSTGAVTSGNYPNWVQQKPGQAPRGLIGGTKFLVPGTPARFSGSLLGGKAALTLSGVQPEDEAEYYCTLWYSNRWVFGGGTKLTVLHHHHHH

SEQ ID NO: 3413 - protein, 513 aa, synthetic construct
  REGION 1..513: note = Description of Artificial Sequence: Synthetic polypeptide
QVQLQESGGGLVQAGGSLGLSCAVSGRTFSGFGTGWFRQPPEKEREFVAAISWDGGRTHYADSVKGRFTISRDNAKNTVFLQMNSLKPEDTAVYYCAAQVARAYDSRWYSGGDYWGQGTQVTVSSGGGGSGGGSEVQLVESGGGLVQPGNSLRLSCAASGFTFSKFGMSWVRQAPGKGLEWVSSISGSGRDTLYADSVKGRFTISRDNAKTTLYLQMNSLRPEDTAVYYCTIGGSLSVSSQGTLVTVSSGGGGSGGGSEVQLVESGGGLVQPGGSLKLSCAASGFTFNKYAINWVRQAPGKGLEWVARIRSKYNNYATYYADQVKDRFTISRDDSKNTAYLQMNNLKTEDTAVYYCVRHANFGNSYISYWAYWGQGTLVTVSSGGGGSGGGGSGGGGSQTVVTQEPSLTVSPGGTVTLTCASSTGAVTSGNYPNWVQQKPGQAPRGLIGGTKFLVPGTPARFSGSLLGGKAALTLSGVQPEDEAEYYCTLWYSNRWVFGGGTKLTVLHHHHHH

SEQ ID NO: 3414 - protein, 516 aa, synthetic construct
  REGION 1..516: note = Description of Artificial Sequence: Synthetic polypeptide
QVQLQESGGGLVQAGGSLRLSCAVSGRTFSGFGTGWFRQAPGKEREFVAAISWSGGTTHYADSVKGRFTISRDNAKNTVSLVYLQMNSLKPDDTAVYYCAGQVARAYDSSWYSRGDYLGQGTQVTVSSGGGGSGGGSEVQLVESGGGLVQPGNSLRLSCAASGFTFSKFGMSWVRQAPGKGLEWVSSISGSGRDTLYADSVKGRFTISRDNAKTTLYLQMNSLRPEDTAVYYCTIGGSLSVSSQGTLVTVSSGGGGSGGGSEVQLVESGGGLVQPGGSLKLSCAASGFTFNKYAINWVRQAPGKGLEWVARIRSKYNNYATYYADQVKDRFTISRDDSKNTAYLQMNNLKTEDTAVYYCVRHANFGNSYISYWAYWGQGTLVTVSSGGGGSGGGGSGGGGSQTVVTQEPSLTVSPGGTVTLTCASSTGAVTSGNYPNWVQQKPGQAPRGLIGGTKFLVPGTPARFSGSLLGGKAALTLSGVQPEDEAEYYCTLWYSNRWVFGGGTKLTVLHHHHHH

SEQ ID NO: 3415 - protein, 513 aa, synthetic construct
  REGION 1..513: note = Description of Artificial Sequence: Synthetic polypeptide
QVQLQESGGGLVQAGGSLRLSCAVSGRTFSGFGTGWFRQAPGKEREFVAAISWDGGRTHYADSVKGRFTISRDNAANTVYLQMNSLKPEDTAVYYCAGQVSRAYDSMWYGRDDYWGQGTQVTVSSGGGGSGGGSEVQLVESGGGLVQPGNSLRLSCAASGFTFSKFGMSWVRQAPGKGLEWVSSISGSGRDTLYADSVKGRFTISRDNAKTTLYLQMNSLRPEDTAVYYCTIGGSLSVSSQGTLVTVSSGGGGSGGGSEVQLVESGGGLVQPGGSLKLSCAASGFTFNKYAINWVRQAPGKGLEWVARIRSKYNNYATYYADQVKDRFTISRDDSKNTAYLQMNNLKTEDTAVYYCVRHANFGNSYISYWAYWGQGTLVTVSSGGGGSGGGGSGGGGSQTVVTQEPSLTVSPGGTVTLTCASSTGAVTSGNYPNWVQQKPGQAPRGLIGGTKFLVPGTPARFSGSLLGGKAALTLSGVQPEDEAEYYCTLWYSNRWVFGGGTKLTVLHHHHHH

SEQ ID NO: 3416 - protein, 516 aa, synthetic construct
  REGION 1..516: note = Description of Artificial Sequence: Synthetic polypeptide
QVQLQESGGGLVQAGGSLRLSCAVSGRTFSGFGTGWFRQAPGKEREFVAAISWSGGTTHYADSVKGRFTISRDNAKNTVNLVYLQMNDLRPEDTAVYYCAGQVARAYDSNWYSRGDYWGQGTQVTVSSGGGGSGGGSEVQLVESGGGLVQPGNSLRLSCAASGFTFSKFGMSWVRQAPGKGLEWVSSISGSGRDTLYADSVKGRFTISRDNAKTTLYLQMNSLRPEDTAVYYCTIGGSLSVSSQGTLVTVSSGGGGSGGGSEVQLVESGGGLVQPGGSLKLSCAASGFTFNKYAINWVRQAPGKGLEWVARIRSKYNNYATYYADQVKDRFTISRDDSKNTAYLQMNNLKTEDTAVYYCVRHANFGNSYISYWAYWGQGTLVTVSSGGGGSGGGGSGGGGSQTVVTQEPSLTVSPGGTVTLTCASSTGAVTSGNYPNWVQQKPGQAPRGLIGGTKFLVPGTPARFSGSLLGGKAALTLSGVQPEDEAEYYCTLWYSNRWVFGGGTKLTVLHHHHHH

SEQ ID NO: 3417 - protein, 513 aa, synthetic construct
  REGION 1..513: note = Description of Artificial Sequence: Synthetic polypeptide
QVQLQESGGGLVQAGGSLRLSCAVSGRTFSGFGTGWFRQAPGKEREFVAAISWSGGTTHYADSVKGRFTISRDNAENTVYLEMNSLKPEDTAVYICAGQVSRAYDSNWYSRDDYWGQGTQVTVSSGGGGSGGGSEVQLVESGGGLVQPGNSLRLSCAASGFTFSKFGMSWVRQAPGKGLEWVSSISGSGRDTLYADSVKGRFTISRDNAKTTLYLQMNSLRPEDTAVYYCTIGGSLSVSSQGTLVTVSSGGGGSGGGSEVQLVESGGGLVQPGGSLKLSCAASGFTFNKYAINWVRQAPGKGLEWVARIRSKYNNYATYYADQVKDRFTISRDDSKNTAYLQMNNLKTEDTAVYYCVRHANFGNSYISYWAYWGQGTLVTVSSGGGGSGGGGSGGGGSQTVVTQEPSLTVSPGGTVTLTCASSTGAVTSGNYPNWVQQKPGQAPRGLIGGTKFLVPGTPARFSGSLLGGKAALTLSGVQPEDEAEYYCTLWYSNRWVFGGGTKLTVLHHHHHH

SEQ ID NO: 3418 - protein, 513 aa, synthetic construct
  REGION 1..513: note = Description of Artificial Sequence: Synthetic polypeptide
QVQLQESGGGLVQAGGSLRLSCAVSGRTFSGFGTGWFRQAPEKEREFVAAISWDGGRTHYADSVKGRFTISRDNAKNTVYLQMNSLKPEDTAIYYCAGQVARAYDTRWYSRGDYWGQGTQVTVSSGGGGSGGGSEVQLVESGGGLVQPGNSLRLSCAASGFTFSKFGMSWVRQAPGKGLEWVSSISGSGRDTLYADSVKGRFTISRDNAKTTLYLQMNSLRPEDTAVYYCTIGGSLSVSSQGTLVTVSSGGGGSGGGSEVQLVESGGGLVQPGGSLKLSCAASGFTFNKYAINWVRQAPGKGLEWVARIRSKYNNYATYYADQVKDRFTISRDDSKNTAYLQMNNLKTEDTAVYYCVRHANFGNSYISYWAYWGQGTLVTVSSGGGGSGGGGSGGGGSQTVVTQEPSLTVSPGGTVTLTCASSTGAVTSGNYPNWVQQKPGQAPRGLIGGTKFLVPGTPARFSGSLLGGKAALTLSGVQPEDEAEYYCTLWYSNRWVFGGGTKLTVLHHHHHH

SEQ ID NO: 3419 - protein, 513 aa, synthetic construct
  REGION 1..513: note = Description of Artificial Sequence: Synthetic polypeptide
QVQLQESGGGLVQAGGSLRLSCAVSGRTFSGFGTGWFRQAPGKEREFVAAISWDGGRTHYADFVKGRFTISRDNAKNTVYLQMNSLKPEDTAVYYCAAQVARAYDSRWYSGGDYWGQGTQVTVSSGGGGSGGGSEVQLVESGGGLVQPGNSLRLSCAASGFTFSKFGMSWVRQAPGKGLEWVSSISGSGRDTLYADSVKGRFTISRDNAKTTLYLQMNSLRPEDTAVYYCTIGGSLSVSSQGTLVTVSSGGGGSGGGSEVQLVESGGGLVQPGGSLKLSCAASGFTFNKYAINWVRQAPGKGLEWVARIRSKYNNYATYYADQVKDRFTISRDDSKNTAYLQMNNLKTEDTAVYYCVRHANFGNSYISYWAYWGQGTLVTVSSGGGGSGGGGSGGGGSQTVVTQEPSLTVSPGGTVTLTCASSTGAVTSGNYPNWVQQKPGQAPRGLIGGTKFLVPGTPARFSGSLLGGKAALTLSGVQPEDEAEYYCTLWYSNRWVFGGGTKLTVLHHHHHH

SEQ ID NO: 3420 - protein, 513 aa, synthetic construct
  REGION 1..513: note = Description of Artificial Sequence: Synthetic polypeptide
QVQLQESGGGLVQAGGSLRLSCAVSGRTFSGFGTGWFRQAPGKEREFVAAVSWSGGTTEIADSVKGRFTISRDNAKNTVYLQMSSLKPGDTAVYYCAGQVARAYDSRWYSRGDYWGQGTQVTVSSGGGGSGGGSEVQLVESGGGLVQPGNSLRLSCAASGFTFSKFGMSWVRQAPGKGLEWVSSISGSGRDTLYADSVKGRFTISRDNAKTTLYLQMNSLRPEDTAVYYCTIGGSLSVSSQGTLVTVSSGGGGSGGGSEVQLVESGGGLVQPGGSLKLSCAASGFTFNKYAINWVRQAPGKGLEWVARIRSKYNNYATYYADQVKDRFTISRDDSKNTAYLQMNNLKTEDTAVYYCVRHANFGNSYISYWAYWGQGTLVTVSSGGGGSGGGGSGGGGSQTVVTQEPSLTVSPGGTVTLTCASSTGAVTSGNYPNWVQQKPGQAPRGLIGGTKFLVPGTPARFSGSLLGGKAALTLSGVQPEDEAEYYCTLWYSNRWVFGGGTKLTVLHHHHHH

SEQ ID NO: 3421 - protein, 516 aa, synthetic construct
  REGION 1..516: note = Description of Artificial Sequence: Synthetic polypeptide
QVQLQESGGGLVQAGDSLRLSCAVSGRTFSGFGTGWFRQAPGKEREFVAAVSQSGGTTHYADSVKGRFTISRDNAKNTETLVYLQMNSLKPEDTAVYYCAGQVARAYDSSWYARGDYWGQGTQVTVSSGGGGSGGGSEVQLVESGGGLVQPGNSLRLSCAASGFTFSKFGMSWVRQAPGKGLEWVSSISGSGRDTLYADSVKGRFTISRDNAKTTLYLQMNSLRPEDTAVYYCTIGGSLSVSSQGTLVTVSSGGGGSGGGSEVQLVESGGGLVQPGGSLKLSCAASGFTFNKYAINWVRQAPGKGLEWVARIRSKYNNYATYYADQVKDRFTISRDDSKNTAYLQMNNLKTEDTAVYYCVRHANFGNSYISYWAYWGQGTLVTVSSGGGGSGGGGSGGGGSQTVVTQEPSLTVSPGGTVTLTCASSTGAVTSGNYPNWVQQKPGQAPRGLIGGTKFLVPGTPARFSGSLLGGKAALTLSGVQPEDEAEYYCTLWYSNRWVFGGGTKLTVLHHHHHH

SEQ ID NO: 3422 - protein, 516 aa, synthetic construct
  REGION 1..516: note = Description of Artificial Sequence: Synthetic polypeptide
QVQLQESGGGLVQAGGSLRLSCAVSGRTFSGFGTGWFRQAPGKEREFVAAISWSGGTTHYADSVKGRFTISRDNAKNTVNLVYLQMNSLRPEDTAVYYCAGQVARAYDSNWYSRGDYWGQGTQVTVSSGGGGSGGGSEVQLVESGGGLVQPGNSLRLSCAASGFTFSKFGMSWVRQAPGKGLEWVSSISGSGRDTLYADSVKGRFTISRDNAKTTLYLQMNSLRPEDTAVYYCTIGGSLSVSSQGTLVTVSSGGGGSGGGSEVQLVESGGGLVQPGGSLKLSCAASGFTFNKYAINWVRQAPGKGLEWVARIRSKYNNYATYYADQVKDRFTISRDDSKNTAYLQMNNLKTEDTAVYYCVRHANFGNSYISYWAYWGQGTLVTVSSGGGGSGGGGSGGGGSQTVVTQEPSLTVSPGGTVTLTCASSTGAVTSGNYPNWVQQKPGQAPRGLIGGTKFLVPGTPARFSGSLLGGKAALTLSGVQPEDEAEYYCTLWYSNRWVFGGGTKLTVLHHHHHH

SEQ ID NO: 3423 - protein, 513 aa, synthetic construct
  REGION 1..513: note = Description of Artificial Sequence: Synthetic polypeptide
QVQLQESGGGLVQAGGSLRLSCRFSGRTFSGFGTGWFRQAPGKEREFVAAISWAGGRTHYEDSVKGRFTISRDNAKNTVYLQMNSLKPEDTAVYYCAVQVSRAYDGIWYSGGDYWGQGTQVTVSSGGGGSGGGSEVQLVESGGGLVQPGNSLRLSCAASGFTFSKFGMSWVRQAPGKGLEWVSSISGSGRDTLYADSVKGRFTISRDNAKTTLYLQMNSLRPEDTAVYYCTIGGSLSVSSQGTLVTVSSGGGGSGGGSEVQLVESGGGLVQPGGSLKLSCAASGFTFNKYAINWVRQAPGKGLEWVARIRSKYNNYATYYADQVKDRFTISRDDSKNTAYLQMNNLKTEDTAVYYCVRHANFGNSYISYWAYWGQGTLVTVSSGGGGSGGGGSGGGGSQTVVTQEPSLTVSPGGTVTLTCASSTGAVTSGNYPNWVQQKPGQAPRGLIGGTKFLVPGTPARFSGSLLGGKAALTLSGVQPEDEAEYYCTLWYSNRWVFGGGTKLTVLHHHHHH

SEQ ID NO: 3424 - protein, 515 aa, synthetic construct
  REGION 1..515: note = Description of Artificial Sequence: Synthetic polypeptide
QVQLQESGGGLVQAGGSLMVSCAASGGTWSSYATGWFRQVPGKERKLIAGISRSGGRTYYAESVKGRFTISRDNAKNTVYLQMNTLKPDDTAVYYCAAARYFTSSVVYTSGNDYDYWGQGTQVTVSSGGGGSGGGSEVQLVESGGGLVQPGNSLRLSCAASGFTFSKFGMSWVRQAPGKGLEWVSSISGSGRDTLYADSVKGRFTISRDNAKTTLYLQMNSLRPEDTAVYYCTIGGSLSVSSQGTLVTVSSGGGGSGGGSEVQLVESGGGLVQPGGSLKLSCAASGFTFNKYAINWVRQAPGKGLEWVARIRSKYNNYATYYADQVKDRFTISRDDSKNTAYLQMNNLKTEDTAVYYCVRHANFGNSYISYWAYWGQGTLVTVSSGGGGSGGGGSGGGGSQTVVTQEPSLTVSPGGTVTLTCASSTGAVTSGNYPNWVQQKPGQAPRGLIGGTKFLVPGTPARFSGSLLGGKAALTLSGVQPEDEAEYYCTLWYSNRWVFGGGTKLTVLHHHHHH

SEQ ID NO: 3425 - protein, 515 aa, synthetic construct
  REGION 1..515: note = Description of Artificial Sequence: Synthetic polypeptide
QVQLQESGGGLVQAGGSLMVSCAASGGTWSSYATGWFRQVPGKERELIAGISRSGGRTYYAESVKGRFTISRDNAKNTVYLQMNTLKPDDTAVYYCAAARYFTSSVVYTSGNDYDYWGQGTQVTVSSGGGGSGGGSEVQLVESGGGLVQPGNSLRLSCAASGFTFSKFGMSWVRQAPGKGLEWVSSISGSGRDTLYADSVKGRFTISRDNAKTTLYLQMNSLRPEDTAVYYCTIGGSLSVSSQGTLVTVSSGGGGSGGGSEVQLVESGGGLVQPGGSLKLSCAASGFTFNKYAINWVRQAPGKGLEWVARIRSKYNNYATYYADQVKDRFTISRDDSKNTAYLQMNNLKTEDTAVYYCVRHANFGNSYISYWAYWGQGTLVTVSSGGGGSGGGGSGGGGSQTVVTQEPSLTVSPGGTVTLTCASSTGAVTSGNYPNWVQQKPGQAPRGLIGGTKFLVPGTPARFSGSLLGGKAALTLSGVQPEDEAEYYCTLWYSNRWVFGGGTKLTVLHHHHHH

SEQ ID NO: 3426 - protein, 514 aa, synthetic construct
  REGION 1..514: note = Description of Artificial Sequence: Synthetic polypeptide
QVQLQESGGGLVQPGGSLRLSCAASGGTFSSYATGWFRQVPGKEREFIAGISRNSGRTYAESVKGRFTISRDNAKNTVYLQMNTLRPDDTAVYYCAAARYFTRDAIYTSGDDYDYWGQGTQVTASSGGGGSGGGSEVQLVESGGGLVQPGNSLRLSCAASGFTFSKFGMSWVRQAPGKGLEWVSSISGSGRDTLYADSVKGRFTISRDNAKTTLYLQMNSLRPEDTAVYYCTIGGSLSVSSQGTLVTVSSGGGGSGGGSEVQLVESGGGLVQPGGSLKLSCAASGFTFNKYAINWVRQAPGKGLEWVARIRSKYNNYATYYADQVKDRFTISRDDSKNTAYLQMNNLKTEDTAVYYCVRHANFGNSYISYWAYWGQGTLVTVSSGGGGSGGGGSGGGGSQTVVTQEPSLTVSPGGTVTLTCASSTGAVTSGNYPNWVQQKPGQAPRGLIGGTKFLVPGTPARFSGSLLGGKAALTLSGVQPEDEAEYYCTLWYSNRWVFGGGTKLTVLHHHHHH

SEQ ID NO: 3427 - protein, 515 aa, synthetic construct
  REGION 1..515: note = Description of Artificial Sequence: Synthetic polypeptide
QVQLQESGGGLVQVGGSLMVSCAASGGTFSSYATGWFRQVPGKEREFIAGVSRNSGRTYYAESVKGRFTISRDNAKNTVYLQMNTLKPDDTGVYYCAAARYFTRDAVYTSGDDYDYWGQGTQVTVSSGGGGSGGGSEVQLVESGGGLVQPGNSLRLSCAASGFTFSKFGMSWVRQAPGKGLEWVSSISGSGRDTLYADSVKGRFTISRDNAKTTLYLQMNSLRPEDTAVYYCTIGGSLSVSSQGTLVTVSSGGGGSGGGSEVQLVESGGGLVQPGGSLKLSCAASGFTFNKYAINWVRQAPGKGLEWVARIRSKYNNYATYYADQVKDRFTISRDDSKNTAYLQMNNLKTEDTAVYYCVRHANFGNSYISYWAYWGQGTLVTVSSGGGGSGGGGSGGGGSQTVVTQEPSLTVSPGGTVTLTCASSTGAVTSGNYPNWVQQKPGQAPRGLIGGTKFLVPGTPARFSGSLLGGKAALTLSGVQPEDEAEYYCTLWYSNRWVFGGGTKLTVLHHHHHH

SEQ ID NO: 3428 - protein, 515 aa, synthetic construct
  REGION 1..515: note = Description of Artificial Sequence: Synthetic polypeptide
QVQLQESGGGLVQLGDSLMVSCAASGGTFSSYATGWFRQVPGREREFIAGISRSGGRTYYAESVKGRFTISRDNAKNTVYLQMNTLKPDDTAVYYCAAARYFTTSVVYTSGDDYDYWGQGTQVTVSSGGGGSGGGSEVQLVESGGGLVQPGNSLRLSCAASGFTFSKFGMSWVRQAPGKGLEWVSSISGSGRDTLYADSVKGRFTISRDNAKTTLYLQMNSLRPEDTAVYYCTIGGSLSVSSQGTLVTVSSGGGGSGGGSEVQLVESGGGLVQPGGSLKLSCAASGFTFNKYAINWVRQAPGKGLEWVARIRSKYNNYATYYADQVKDRFTISRDDSKNTAYLQMNNLKTEDTAVYYCVRHANFGNSYISYWAYWGQGTLVTVSSGGGGSGGGGSGGGGSQTVVTQEPSLTVSPGGTVTLTCASSTGAVTSGNYPNWVQQKPGQAPRGLIGGTKFLVPGTPARFSGSLLGGKAALTLSGVQPEDEAEYYCTLWYSNRWVFGGGTKLTVLHHHHHH

SEQ ID NO: 3429 - protein, 515 aa, synthetic construct
  REGION 1..515: note = Description of Artificial Sequence: Synthetic polypeptide
QVQLQESGGGLVQLGDSLMVSCAASGGTFSSYATGWFRQVPGKEREFIAGISRSGGRTYYAESVKGRFTISRDNAKNTVYLQMNTLKPDDTAVYYCAAARYFTTSVVYTSGDDYDYWGQGTQVTVSSGGGGSGGGSEVQLVESGGGLVQPGNSLRLSCAASGFTFSKFGMSWVRQAPGKGLEWVSSISGSGRDTLYADSVKGRFTISRDNAKTTLYLQMNSLRPEDTAVYYCTIGGSLSVSSQGTLVTVSSGGGGSGGGSEVQLVESGGGLVQPGGSLKLSCAASGFTFNKYAINWVRQAPGKGLEWVARIRSKYNNYATYYADQVKDRFTISRDDSKNTAYLQMNNLKTEDTAVYYCVRHANFGNSYISYWAYWGQGTLVTVSSGGGGSGGGGSGGGGSQTVVTQEPSLTVSPGGTVTLTCASSTGAVTSGNYPNWVQQKPGQAPRGLIGGTKFLVPGTPARFSGSLLGGKAALTLSGVQPEDEAEYYCTLWYSNRWVFGGGTKLTVLHHHHHH

SEQ ID NO: 3430 - protein, 515 aa, synthetic construct
  REGION 1..515: note = Description of Artificial Sequence: Synthetic polypeptide
QVQLQESGGGLVQAGGSLMVSCAASGGTWSSYATGWFRQVPGKERELIAGISRSGGRTYYAESVKGRFTISRDNAKNTVYLQMNTLKSDDTAVYYCAAARYFTSSVVYTSGNDYDYWGQGTQVTVSSGGGGSGGGSEVQLVESGGGLVQPGNSLRLSCAASGFTFSKFGMSWVRQAPGKGLEWVSSISGSGRDTLYADSVKGRFTISRDNAKTTLYLQMNSLRPEDTAVYYCTIGGSLSVSSQGTLVTVSSGGGGSGGGSEVQLVESGGGLVQPGGSLKLSCAASGFTFNKYAINWVRQAPGKGLEWVARIRSKYNNYATYYADQVKDRFTISRDDSKNTAYLQMNNLKTEDTAVYYCVRHANFGNSYISYWAYWGQGTLVTVSSGGGGSGGGGSGGGGSQTVVTQEPSLTVSPGGTVTLTCASSTGAVTSGNYPNWVQQKPGQAPRGLIGGTKFLVPGTPARFSGSLLGGKAALTLSGVQPEDEAEYYCTLWYSNRWVFGGGTKLTVLHHHHHH

SEQ ID NO: 3431 - protein, 515 aa, synthetic construct
  REGION 1..515: note = Description of Artificial Sequence: Synthetic polypeptide
QVQLQESGGGLVQVGGSLMVSCAASGGTFSSYATGWFRQVPGKEREFIAGISRNSGRTYYAESVKGRFTISRDNAKNTVYLQMNTLKPDDTAVYYCAAARYFTRDAVYTSGDDYDYWGQGTQVTVSSGGGGSGGGSEVQLVESGGGLVQPGNSLRLSCAASGFTFSKFGMSWVRQAPGKGLEWVSSISGSGRDTLYADSVKGRFTISRDNAKTTLYLQMNSLRPEDTAVYYCTIGGSLSVSSQGTLVTVSSGGGGSGGGSEVQLVESGGGLVQPGGSLKLSCAASGFTFNKYAINWVRQAPGKGLEWVARIRSKYNNYATYYADQVKDRFTISRDDSKNTAYLQMNNLKTEDTAVYYCVRHANFGNSYISYWAYWGQGTLVTVSSGGGGSGGGGSGGGGSQTVVTQEPSLTVSPGGTVTLTCASSTGAVTSGNYPNWVQQKPGQAPRGLIGGTKFLVPGTPARFSGSLLGGKAALTLSGVQPEDEAEYYCTLWYSNRWVFGGGTKLTVLHHHHHH

SEQ ID NO: 3432 - protein, 515 aa, synthetic construct
  REGION 1..515: note = Description of Artificial Sequence: Synthetic polypeptide
QVQLQESGGGLVQVGGSLMVSCAASGGTFSSYATGWFRQVPGKEREFIAGISRNSGRTYYAESVKGRFTISRDNAKNTVYLQMNTLKPDDTAVYYCAAARYFTRDVVYTSGDDYDYWGQGTQVTVSSGGGGSGGGSEVQLVESGGGLVQPGNSLRLSCAASGFTFSKFGMSWVRQAPGKGLEWVSSISGSGRDTLYADSVKGRFTISRDNAKTTLYLQMNSLRPEDTAVYYCTIGGSLSVSSQGTLVTVSSGGGGSGGGSEVQLVESGGGLVQPGGSLKLSCAASGFTFNKYAINWVRQAPGKGLEWVARIRSKYNNYATYYADQVKDRFTISRDDSKNTAYLQMNNLKTEDTAVYYCVRHANFGNSYISYWAYWGQGTLVTVSSGGGGSGGGGSGGGGSQTVVTQEPSLTVSPGGTVTLTCASSTGAVTSGNYPNWVQQKPGQAPRGLIGGTKFLVPGTPARFSGSLLGGKAALTLSGVQPEDEAEYYCTLWYSNRWVFGGGTKLTVLHHHHHH

SEQ ID NO: 3433 - protein, 515 aa, synthetic construct
  REGION 1..515: note = Description of Artificial Sequence: Synthetic polypeptide
QVQLQESGGGLVQAGGSLMVSCAASGGTFSSYATGWFRQVPGKEREFIAGISRSGGRTYYAESVKGRFTISRDNAKNTVYLQMNTLKPDDTAVYYCAAARYFTTSVVYTSGDDYDYWGQGTQVTVSSGGGGSGGGSEVQLVESGGGLVQPGNSLRLSCAASGFTFSKFGMSWVRQAPGKGLEWVSSISGSGRDTLYADSVKGRFTISRDNAKTTLYLQMNSLRPEDTAVYYCTIGGSLSVSSQGTLVTVSSGGGGSGGGSEVQLVESGGGLVQPGGSLKLSCAASGFTFNKYAINWVRQAPGKGLEWVARIRSKYNNYATYYADQVKDRFTISRDDSKNTAYLQMNNLKTEDTAVYYCVRHANFGNSYISYWAYWGQGTLVTVSSGGGGSGGGGSGGGGSQTVVTQEPSLTVSPGGTVTLTCASSTGAVTSGNYPNWVQQKPGQAPRGLIGGTKFLVPGTPARFSGSLLGGKAALTLSGVQPEDEAEYYCTLWYSNRWVFGGGTKLTVLHHHHHH

SEQ ID NO: 3434 - protein, 513 aa, synthetic construct
  REGION 1..513: note = Description of Artificial Sequence: Synthetic polypeptide
QVQLQESGGGLVQAGGSLRLSCAASGRTFSSYAMGWFRQAPGKEREFVAAISWSGSNTYYADSVKGRFTISRDNAKNTVYLQMDSLKPEDTAVYYCAAGGSTRVVVTTTPVVKYWGQGTQVTVSSGGGGSGGGSEVQLVESGGGLVQPGNSLRLSCAASGFTFSKFGMSWVRQAPGKGLEWVSSISGSGRDTLYADSVKGRFTISRDNAKTTLYLQMNSLRPEDTAVYYCTIGGSLSVSSQGTLVTVSSGGGGSGGGSEVQLVESGGGLVQPGGSLKLSCAASGFTFNKYAINWVRQAPGKGLEWVARIRSKYNNYATYYADQVKDRFTISRDDSKNTAYLQMNNLKTEDTAVYYCVRHANFGNSYISYWAYWGQGTLVTVSSGGGGSGGGGSGGGGSQTVVTQEPSLTVSPGGTVTLTCASSTGAVTSGNYPNWVQQKPGQAPRGLIGGTKFLVPGTPARFSGSLLGGKAALTLSGVQPEDEAEYYCTLWYSNRWVFGGGTKLTVLHHHHHH

SEQ ID NO: 3435 - protein, 513 aa, synthetic construct
  REGION 1..513: note = Description of Artificial Sequence: Synthetic polypeptide
QVQLQESGGGLVQAGGSLRLSCAASGRTFSSYAMGWFRQAPGMEREFVAAISWSGYSTYYADSVKGRFTISRDDAKNTVYLQMDSLKPEDTAVYYCAAGGSTRVVVTTTPVVKYWGQGTQVTVSSGGGGSGGGSEVQLVESGGGLVQPGNSLRLSCAASGFTFSKFGMSWVRQAPGKGLEWVSSISGSGRDTLYADSVKGRFTISRDNAKTTLYLQMNSLRPEDTAVYYCTIGGSLSVSSQGTLVTVSSGGGGSGGGSEVQLVESGGGLVQPGGSLKLSCAASGFTFNKYAINWVRQAPGKGLEWVARIRSKYNNYATYYADQVKDRFTISRDDSKNTAYLQMNNLKTEDTAVYYCVRHANFGNSYISYWAYWGQGTLVTVSSGGGGSGGGGSGGGGSQTVVTQEPSLTVSPGGTVTLTCASSTGAVTSGNYPNWVQQKPGQAPRGLIGGTKFLVPGTPARFSGSLLGGKAALTLSGVQPEDEAEYYCTLWYSNRWVFGGGTKLTVLHHHHHH

SEQ ID NO: 3436 - protein, 513 aa, synthetic construct
  REGION 1..513: note = Description of Artificial Sequence: Synthetic polypeptide
QVQLQESGGGLVQAGGSLRLSCAASGRTFSSYALGWFRQAPGKEREFVAAISWSGGNTYYADSVKGRFTISRDDAKNTVYLQMDSLKPEDTAVYYCAAGGSTRVVVTTTPVVKYWGQGTQVTVSSGGGGSGGGSEVQLVESGGGLVQPGNSLRLSCAASGFTFSKFGMSWVRQAPGKGLEWVSSISGSGRDTLYADSVKGRFTISRDNAKTTLYLQMNSLRPEDTAVYYCTIGGSLSVSSQGTLVTVSSGGGGSGGGSEVQLVESGGGLVQPGGSLKLSCAASGFTFNKYAINWVRQAPGKGLEWVARIRSKYNNYATYYADQVKDRFTISRDDSKNTAYLQMNNLKTEDTAVYYCVRHANFGNSYISYWAYWGQGTLVTVSSGGGGSGGGGSGGGGSQTVVTQEPSLTVSPGGTVTLTCASSTGAVTSGNYPNWVQQKPGQAPRGLIGGTKFLVPGTPARFSGSLLGGKAALTLSGVQPEDEAEYYCTLWYSNRWVFGGGTKLTVLHHHHHH

SEQ ID NO: 3437 - protein, 513 aa, synthetic construct
  REGION 1..513: note = Description of Artificial Sequence: Synthetic polypeptide
QVQLQESGGGLVQAGGSLRLSCAASERTFSSYTMGWFRQAPGKEREFVAAMSWSGGSTYYADSVKGRFTISRDNAKNTVYLQMDSLKPEDTAVYYCAAGGSTRVVVTTTPVVKYWGQGTQVTVSSGGGGSGGGSEVQLVESGGGLVQPGNSLRLSCAASGFTFSKFGMSWVRQAPGKGLEWVSSISGSGRDTLYADSVKGRFTISRDNAKTTLYLQMNSLRPEDTAVYYCTIGGSLSVSSQGTLVTVSSGGGGSGGGSEVQLVESGGGLVQPGGSLKLSCAASGFTFNKYAINWVRQAPGKGLEWVARIRSKYNNYATYYADQVKDRFTISRDDSKNTAYLQMNNLKTEDTAVYYCVRHANFGNSYISYWAYWGQGTLVTVSSGGGGSGGGGSGGGGSQTVVTQEPSLTVSPGGTVTLTCASSTGAVTSGNYPNWVQQKPGQAPRGLIGGTKFLVPGTPARFSGSLLGGKAALTLSGVQPEDEAEYYCTLWYSNRWVFGGGTKLTVLHHHHHH

SEQ ID NO: 3438 - protein, 513 aa, synthetic construct
  REGION 1..513: note = Description of Artificial Sequence: Synthetic polypeptide
QVQLQESGGGLVQAGGSLRLSCAASERTFSSYAMGWFRQAPGKEREFVAAISWSGGSTYYADSVKGRFTISRDNAKNTVYLQMDSLKPEDTAVYYCAAGGSTRVVVTTTPIVKYWGQGTQVTVSSGGGGSGGGSEVQLVESGGGLVQPGNSLRLSCAASGFTFSKFGMSWVRQAPGKGLEWVSSISGSGRDTLYADSVKGRFTISRDNAKTTLYLQMNSLRPEDTAVYYCTIGGSLSVSSQGTLVTVSSGGGGSGGGSEVQLVESGGGLVQPGGSLKLSCAASGFTFNKYAINWVRQAPGKGLEWVARIRSKYNNYATYYADQVKDRFTISRDDSKNTAYLQMNNLKTEDTAVYYCVRHANFGNSYISYWAYWGQGTLVTVSSGGGGSGGGGSGGGGSQTVVTQEPSLTVSPGGTVTLTCASSTGAVTSGNYPNWVQQKPGQAPRGLIGGTKFLVPGTPARFSGSLLGGKAALTLSGVQPEDEAEYYCTLWYSNRWVFGGGTKLTVLHHHHHH

SEQ ID NO: 3439 - protein, 513 aa, synthetic construct
  REGION 1..513: note = Description of Artificial Sequence: Synthetic polypeptide
QVQLQESGGGWVQAGGSLRLSCAASGRTFSSYAMGWFRQAPGKEREFVAAISWSGSSTYYADSVKGRFTISRDNAKNTVYLLMDSLKPEDTAVYYCAAGGSTRVVVTTTPVVKYWGQGTQVTVSSGGGGSGGGSEVQLVESGGGLVQPGNSLRLSCAASGFTFSKFGMSWVRQAPGKGLEWVSSISGSGRDTLYADSVKGRFTISRDNAKTTLYLQMNSLRPEDTAVYYCTIGGSLSVSSQGTLVTVSSGGGGSGGGSEVQLVESGGGLVQPGGSLKLSCAASGFTFNKYAINWVRQAPGKGLEWVARIRSKYNNYATYYADQVKDRFTISRDDSKNTAYLQMNNLKTEDTAVYYCVRHANFGNSYISYWAYWGQGTLVTVSSGGGGSGGGGSGGGGSQTVVTQEPSLTVSPGGTVTLTCASSTGAVTSGNYPNWVQQKPGQAPRGLIGGTKFLVPGTPARFSGSLLGGKAALTLSGVQPEDEAEYYCTLWYSNRWVFGGGTKLTVLHHHHHH

SEQ ID NO: 3440 - protein, 509 aa, synthetic construct
  REGION 1..509: note = Description of Artificial Sequence: Synthetic polypeptide
QVQLQESGGGLVQAGGSLRLSCAASGRTFSTLTVAWFRQAPGKEREFVVASIPSGSNTGYAESVKGRFTISRDIAKNTVYLQMNSLKPEDTAMYFCAARIYFGSSRGYDYWGQGTQVTVSSGGGGSGGGSEVQLVESGGGLVQPGNSLRLSCAASGFTFSKFGMSWVRQAPGKGLEWVSSISGSGRDTLYADSVKGRFTISRDNAKTTLYLQMNSLRPEDTAVYYCTIGGSLSVSSQGTLVTVSSGGGGSGGGSEVQLVESGGGLVQPGGSLKLSCAASGFTFNKYAINWVRQAPGKGLEWVARIRSKYNNYATYYADQVKDRFTISRDDSKNTAYLQMNNLKTEDTAVYYCVRHANFGNSYISYWAYWGQGTLVTVSSGGGGSGGGGSGGGGSQTVVTQEPSLTVSPGGTVTLTCASSTGAVTSGNYPNWVQQKPGQAPRGLIGGTKFLVPGTPARFSGSLLGGKAALTLSGVQPEDEAEYYCTLWYSNRWVFGGGTKLTVLHHHHHH

SEQ ID NO: 3441 - protein, 509 aa, synthetic construct
  REGION 1..509: note = Description of Artificial Sequence: Synthetic polypeptide
QVQLQESGGGLVQAGGSLRLSCAASGRTFTTYTVAWFRQAPGKEREFLVASIPTGSNTAYAESVKGRFTISRGNAKNTVYLQMNSLKPEDTAMYYCAARTYFGSSRGYDYWGQGTQVTVSSGGGGSGGGSEVQLVESGGGLVQPGNSLRLSCAASGFTFSKFGMSWVRQAPGKGLEWVSSISGSGRDTLYADSVKGRFTISRDNAKTTLYLQMNSLRPEDTAVYYCTIGGSLSVSSQGTLVTVSSGGGGSGGGSEVQLVESGGGLVQPGGSLKLSCAASGFTFNKYAINWVRQAPGKGLEWVARIRSKYNNYATYYADQVKDRFTISRDDSKNTAYLQMNNLKTEDTAVYYCVRHANFGNSYISYWAYWGQGTLVTVSSGGGGSGGGGSGGGGSQTVVTQEPSLTVSPGGTVTLTCASSTGAVTSGNYPNWVQQKPGQAPRGLIGGTKFLVPGTPARFSGSLLGGKAALTLSGVQPEDEAEYYCTLWYSNRWVFGGGTKLTVLHHHHHH

SEQ ID NO: 3442 - protein, 513 aa, synthetic construct
  REGION 1..513: note = Description of Artificial Sequence: Synthetic polypeptide
QVQLQESGGGLVQAGDSLRLSCATSGRTFNLYRVGWFRQAPGKEREFVARITWSADITQYADSVKGRFTISRDNAKNTVYLQMNSLKPEDTAIYYCATTLRKSSGIYHVDDYDDWGQGTQVTVSSGGGGSGGGSEVQLVESGGGLVQPGNSLRLSCAASGFTFSKFGMSWVRQAPGKGLEWVSSISGSGRDTLYADSVKGRFTISRDNAKTTLYLQMNSLRPEDTAVYYCTIGGSLSVSSQGTLVTVSSGGGGSGGGSEVQLVESGGGLVQPGGSLKLSCAASGFTFNKYAINWVRQAPGKGLEWVARIRSKYNNYATYYADQVKDRFTISRDDSKNTAYLQMNNLKTEDTAVYYCVRHANFGNSYISYWAYWGQGTLVTVSSGGGGSGGGGSGGGGSQTVVTQEPSLTVSPGGTVTLTCASSTGAVTSGNYPNWVQQKPGQAPRGLIGGTKFLVPGTPARFSGSLLGGKAALTLSGVQPEDEAEYYCTLWYSNRWVFGGGTKLTVLHHHHHH

SEQ ID NO: 3443 - protein, 513 aa, synthetic construct
  REGION 1..513: note = Description of Artificial Sequence: Synthetic polypeptide
QVQLQESGGGLVQAGGSLRLSCATSGRTFNLYRVGWFRQAPGKEREFVARITWSADITQYTDSVKGRFTISRDNAKNTVYLQMNSLKPEDTAIYYCATTLRKSSGIYHTDDYDYWGQGTQVTVSSGGGGSGGGSEVQLVESGGGLVQPGNSLRLSCAASGFTFSKFGMSWVRQAPGKGLEWVSSISGSGRDTLYADSVKGRFTISRDNAKTTLYLQMNSLRPEDTAVYYCTIGGSLSVSSQGTLVTVSSGGGGSGGGSEVQLVESGGGLVQPGGSLKLSCAASGFTFNKYAINWVRQAPGKGLEWVARIRSKYNNYATYYADQVKDRFTISRDDSKNTAYLQMNNLKTEDTAVYYCVRHANFGNSYISYWAYWGQGTLVTVSSGGGGSGGGGSGGGGSQTVVTQEPSLTVSPGGTVTLTCASSTGAVTSGNYPNWVQQKPGQAPRGLIGGTKFLVPGTPARFSGSLLGGKAALTLSGVQPEDEAEYYCTLWYSNRWVFGGGTKLTVLHHHHHH

SEQ ID NO: 3444 - protein, 510 aa, synthetic construct
  REGION 1..510: note = Description of Artificial Sequence: Synthetic polypeptide
QVQLQESGGGLVQPGGSLRLSCAASGFTFSDYAMSWVRQAPGKGLEWVSGISSGGYKIGYTDSTKGRFTISRDNAKNTLYLQMNSLTAEDTAVYYCAKGTQWSWSLRDNTSRGQGTQVTVSSGGGGSGGGSEVQLVESGGGLVQPGNSLRLSCAASGFTFSKFGMSWVRQAPGKGLEWVSSISGSGRDTLYADSVKGRFTISRDNAKTTLYLQMNSLRPEDTAVYYCTIGGSLSVSSQGTLVTVSSGGGGSGGGSEVQLVESGGGLVQPGGSLKLSCAASGFTFNKYAINWVRQAPGKGLEWVARIRSKYNNYATYYADQVKDRFTISRDDSKNTAYLQMNNLKTEDTAVYYCVRHANFGNSYISYWAYWGQGTLVTVSSGGGGSGGGGSGGGGSQTVVTQEPSLTVSPGGTVTLTCASSTGAVTSGNYPNWVQQKPGQAPRGLIGGTKFLVPGTPARFSGSLLGGKAALTLSGVQPEDEAEYYCTLWYSNRWVFGGGTKLTVLHHHHHH

SEQ ID NO: 3445 - protein, 510 aa, synthetic construct
  REGION 1..510: note = Description of Artificial Sequence: Synthetic polypeptide
QVQLQESGGGLVQPGGSLRLSCKASGFTFSSYAMSWVRQAPGKGLEWVSGISSGGYKIGYTDSTKGRFTISRDNAKNTLYLQMNSLNAEDTAVYYCAKGTQWSWALRDSTSRGQGTQVTVSSGGGGSGGGSEVQLVESGGGLVQPGNSLRLSCAASGFTFSKFGMSWVRQAPGKGLEWVSSISGSGRDTLYADSVKGRFTISRDNAKTTLYLQMNSLRPEDTAVYYCTIGGSLSVSSQGTLVTVSSGGGGSGGGSEVQLVESGGGLVQPGGSLKLSCAASGFTFNKYAINWVRQAPGKGLEWVARIRSKYNNYATYYADQVKDRFTISRDDSKNTAYLQMNNLKTEDTAVYYCVRHANFGNSYISYWAYWGQGTLVTVSSGGGGSGGGGSGGGGSQTVVTQEPSLTVSPGGTVTLTCASSTGAVTSGNYPNWVQQKPGQAPRGLIGGTKFLVPGTPARFSGSLLGGKAALTLSGVQPEDEAEYYCTLWYSNRWVFGGGTKLTVLHHHHHH

SEQ ID NO: 3446 - protein, 499 aa, synthetic construct
  REGION 1..499: note = Description of Artificial Sequence: Synthetic polypeptide
QVQLQESGGGLVQAGGSLTLSCTASGSTFSINHFSWYRQAPGKQRELVAFISSDGVSIDVESVKGRFTISGDNDKNTAYLQMNGLKPEDTAVYYCYYRGFWGQGTQVTVSSGGGGSGGGSEVQLVESGGGLVQPGNSLRLSCAASGFTFSKFGMSWVRQAPGKGLEWVSSISGSGRDTLYADSVKGRFTISRDNAKTTLYLQMNSLRPEDTAVYYCTIGGSLSVSSQGTLVTVSSGGGGSGGGSEVQLVESGGGLVQPGGSLKLSCAASGFTFNKYAINWVRQAPGKGLEWVARIRSKYNNYATYYADQVKDRFTISRDDSKNTAYLQMNNLKTEDTAVYYCVRHANFGNSYISYWAYWGQGTLVTVSSGGGGSGGGGSGGGGSQTVVTQEPSLTVSPGGTVTLTCASSTGAVTSGNYPNWVQQKPGQAPRGLIGGTKFLVPGTPARFSGSLLGGKAALTLSGVQPEDEAEYYCTLWYSNRWVFGGGTKLTVLHHHHHH

SEQ ID NO: 3447 - protein, 499 aa, synthetic construct
  REGION 1..499: note = Description of Artificial Sequence: Synthetic polypeptide
QVQLQESGGGLVQPGGSLTLSCTASGSTFSINHFAWYRQAPGKQRELVAFISSDGRSTDVESVKGRFTISGDNDKNTAYLQMNGLKPEDTAVYYCYYRGSWGQGTQVTVSSGGGGSGGGSEVQLVESGGGLVQPGNSLRLSCAASGFTFSKFGMSWVRQAPGKGLEWVSSISGSGRDTLYADSVKGRFTISRDNAKTTLYLQMNSLRPEDTAVYYCTIGGSLSVSSQGTLVTVSSGGGGSGGGSEVQLVESGGGLVQPGGSLKLSCAASGFTFNKYAINWVRQAPGKGLEWVARIRSKYNNYATYYADQVKDRFTISRDDSKNTAYLQMNNLKTEDTAVYYCVRHANFGNSYISYWAYWGQGTLVTVSSGGGGSGGGGSGGGGSQTVVTQEPSLTVSPGGTVTLTCASSTGAVTSGNYPNWVQQKPGQAPRGLIGGTKFLVPGTPARFSGSLLGGKAALTLSGVQPEDEAEYYCTLWYSNRWVFGGGTKLTVLHHHHHH

SEQ ID NO: 3448 - protein, 515 aa, synthetic construct
  REGION 1..515: note = Description of Artificial Sequence: Synthetic polypeptide
QVQLQESGGGLVQAGGSLSLSCAASEGTISHAAMGWFRQAPGKERQFVAYDTWTGGSTNYADSVKDRFTITGDHAKNTVYLQMNSLKPEDTGVYYCAVRGRYSASYTYTNPASYKYWGQGTQVTVSSGGGGSGGGSEVQLVESGGGLVQPGNSLRLSCAASGFTFSKFGMSWVRQAPGKGLEWVSSISGSGRDTLYADSVKGRFTISRDNAKTTLYLQMNSLRPEDTAVYYCTIGGSLSVSSQGTLVTVSSGGGGSGGGSEVQLVESGGGLVQPGGSLKLSCAASGFTFNKYAINWVRQAPGKGLEWVARIRSKYNNYATYYADQVKDRFTISRDDSKNTAYLQMNNLKTEDTAVYYCVRHANFGNSYISYWAYWGQGTLVTVSSGGGGSGGGGSGGGGSQTVVTQEPSLTVSPGGTVTLTCASSTGAVTSGNYPNWVQQKPGQAPRGLIGGTKFLVPGTPARFSGSLLGGKAALTLSGVQPEDEAEYYCTLWYSNRWVFGGGTKLTVLHHHHHH

SEQ ID NO: 3449 - protein, 514 aa, synthetic construct
  REGION 1..514: note = Description of Artificial Sequence: Synthetic polypeptide
QVQLQESGGGLVQAGGSLRLSCAASGGTFSSSAMGWFRQAPGKEREFVATITQNDVPTYYTHSVKGRFTISRDNAKNTMYLQMNSLKPEDTAVYYCAQRVAQASGWRTTIKDYGYWGQGTQVTVSSGGGGSGGGSEVQLVESGGGLVQPGNSLRLSCAASGFTFSKFGMSWVRQAPGKGLEWVSSISGSGRDTLYADSVKGRFTISRDNAKTTLYLQMNSLRPEDTAVYYCTIGGSLSVSSQGTLVTVSSGGGGSGGGSEVQLVESGGGLVQPGGSLKLSCAASGFTFNKYAINWVRQAPGKGLEWVARIRSKYNNYATYYADQVKDRFTISRDDSKNTAYLQMNNLKTEDTAVYYCVRHANFGNSYISYWAYWGQGTLVTVSSGGGGSGGGGSGGGGSQTVVTQEPSLTVSPGGTVTLTCASSTGAVTSGNYPNWVQQKPGQAPRGLIGGTKFLVPGTPARFSGSLLGGKAALTLSGVQPEDEAEYYCTLWYSNRWVFGGGTKLTVLHHHHHH

SEQ ID NO: 3450 - protein, 517 aa, synthetic construct
  REGION 1..517: note = Description of Artificial Sequence: Synthetic polypeptide
QVQLQESGGGLVQAGGSLRLSCAASGLTSSTYRMAWFRQAPGKEREFAAGISYSADSGGSTNYADSVKGRFTISRDNAKNTVYLQMSSLKPEDTAVYYCAAGRYSGTYNSPYSSSYVYWGQGTQVTVSSGGGGSGGGSEVQLVESGGGLVQPGNSLRLSCAASGFTFSKFGMSWVRQAPGKGLEWVSSISGSGRDTLYADSVKGRFTISRDNAKTTLYLQMNSLRPEDTAVYYCTIGGSLSVSSQGTLVTVSSGGGGSGGGSEVQLVESGGGLVQPGGSLKLSCAASGFTFNKYAINWVRQAPGKGLEWVARIRSKYNNYATYYADQVKDRFTISRDDSKNTAYLQMNNLKTEDTAVYYCVRHANFGNSYISYWAYWGQGTLVTVSSGGGGSGGGGSGGGGSQTVVTQEPSLTVSPGGTVTLTCASSTGAVTSGNYPNWVQQKPGQAPRGLIGGTKFLVPGTPARFSGSLLGGKAALTLSGVQPEDEAEYYCTLWYSNRWVFGGGTKLTVLHHHHHH

SEQ ID NO: 3451 - protein, 508 aa, synthetic construct
  REGION 1..508: note = Description of Artificial Sequence: Synthetic polypeptide
QVQLQESGGGLVQTGGSLRLSCAASGSTFSRNTMGWFRQAPGKERVFVLGISWSGIRSYYLDSAKARFTISRDNAKNTVYLQMNSLRPEDTAVYYCAAQEGSSPGPYKYWGQGTQVTVSSGGGGSGGGSEVQLVESGGGLVQPGNSLRLSCAASGFTFSKFGMSWVRQAPGKGLEWVSSISGSGRDTLYADSVKGRFTISRDNAKTTLYLQMNSLRPEDTAVYYCTIGGSLSVSSQGTLVTVSSGGGGSGGGSEVQLVESGGGLVQPGGSLKLSCAASGFTFNKYAINWVRQAPGKGLEWVARIRSKYNNYATYYADQVKDRFTISRDDSKNTAYLQMNNLKTEDTAVYYCVRHANFGNSYISYWAYWGQGTLVTVSSGGGGSGGGGSGGGGSQTVVTQEPSLTVSPGGTVTLTCASSTGAVTSGNYPNWVQQKPGQAPRGLIGGTKFLVPGTPARFSGSLLGGKAALTLSGVQPEDEAEYYCTLWYSNRWVFGGGTKLTVLHHHHHH

SEQ ID NO: 3452 - protein, 509 aa, synthetic construct
  REGION 1..509: note = Description of Artificial Sequence: Synthetic polypeptide
QVQLQESGGGVVQVGGSLRLSCAASGGTFGYYAVGWFRQAPGKEREFVAAVTWNGAYLYSDPVKGRFTISRDNAKNTVYLQMNSLKSEDTAVYYCGLDRWSAVVESTPSTRGQGTQVTVSSGGGGSGGGSEVQLVESGGGLVQPGNSLRLSCAASGFTFSKFGMSWVRQAPGKGLEWVSSISGSGRDTLYADSVKGRFTISRDNAKTTLYLQMNSLRPEDTAVYYCTIGGSLSVSSQGTLVTVSSGGGGSGGGSEVQLVESGGGLVQPGGSLKLSCAASGFTFNKYAINWVRQAPGKGLEWVARIRSKYNNYATYYADQVKDRFTISRDDSKNTAYLQMNNLKTEDTAVYYCVRHANFGNSYISYWAYWGQGTLVTVSSGGGGSGGGGSGGGGSQTVVTQEPSLTVSPGGTVTLTCASSTGAVTSGNYPNWVQQKPGQAPRGLIGGTKFLVPGTPARFSGSLLGGKAALTLSGVQPEDEAEYYCTLWYSNRWVFGGGTKLTVLHHHHHH

SEQ ID NO: 3453 - protein, 513 aa, synthetic construct
  REGION 1..513: note = Description of Artificial Sequence: Synthetic polypeptide
QVQLQESGGGLVQAGGSLRLSCAASGGAFSSYVMGWFRQAPGKEREFVAAVISWSGRITDYADSVKGRFSISRDNAKSTVYLQMNNLKPEDTAVYYCAAKTGMYIDLRTSTFDYWGQGTQVTVSSGGGGSGGGSEVQLVESGGGLVQPGNSLRLSCAASGFTFSKFGMSWVRQAPGKGLEWVSSISGSGRDTLYADSVKGRFTISRDNAKTTLYLQMNSLRPEDTAVYYCTIGGSLSVSSQGTLVTVSSGGGGSGGGSEVQLVESGGGLVQPGGSLKLSCAASGFTFNKYAINWVRQAPGKGLEWVARIRSKYNNYATYYADQVKDRFTISRDDSKNTAYLQMNNLKTEDTAVYYCVRHANFGNSYISYWAYWGQGTLVTVSSGGGGSGGGGSGGGGSQTVVTQEPSLTVSPGGTVTLTCASSTGAVTSGNYPNWVQQKPGQAPRGLIGGTKFLVPGTPARFSGSLLGGKAALTLSGVQPEDEAEYYCTLWYSNRWVFGGGTKLTVLHHHHHH

SEQ ID NO: 3454 - protein, 508 aa, synthetic construct
  REGION 1..508: note = Description of Artificial Sequence: Synthetic polypeptide
QVQLQESGGGSVQAGGSLRLSCTASGRTFTDYTMGWFRQAPGKEREFMLGISSNGYRRYYTGSMKDRFTISRDNVKKTVYLQMNDLKPEDTAVYYCAASEDHGAPRYDYWGQGTQVTVSSGGGGSGGGSEVQLVESGGGLVQPGNSLRLSCAASGFTFSKFGMSWVRQAPGKGLEWVSSISGSGRDTLYADSVKGRFTISRDNAKTTLYLQMNSLRPEDTAVYYCTIGGSLSVSSQGTLVTVSSGGGGSGGGSEVQLVESGGGLVQPGGSLKLSCAASGFTFNKYAINWVRQAPGKGLEWVARIRSKYNNYATYYADQVKDRFTISRDDSKNTAYLQMNNLKTEDTAVYYCVRHANFGNSYISYWAYWGQGTLVTVSSGGGGSGGGGSGGGGSQTVVTQEPSLTVSPGGTVTLTCASSTGAVTSGNYPNWVQQKPGQAPRGLIGGTKFLVPGTPARFSGSLLGGKAALTLSGVQPEDEAEYYCTLWYSNRWVFGGGTKLTVLHHHHHH

SEQ ID NO: 3455 - protein, 513 aa, synthetic construct
  REGION 1..513: note = Description of Artificial Sequence: Synthetic polypeptide
EVQLLESGGGLVQPGGSLTLSCAASGRTFSSYAMGWFRQAPGKEREFVAAISWSGSNTYYADSVKGRFTISRDNSKNTLYLQMNSLRAEDTAVYYCAAGGSTRVVVTTTPVVKYWGQGTLVTVSSGGGGSGGGSEVQLVESGGGLVQPGNSLRLSCAASGFTFSKFGMSWVRQAPGKGLEWVSSISGSGRDTLYADSVKGRFTISRDNAKTTLYLQMNSLRPEDTAVYYCTIGGSLSVSSQGTLVTVSSGGGGSGGGSEVQLVESGGGLVQPGGSLKLSCAASGFTFNKYAINWVRQAPGKGLEWVARIRSKYNNYATYYADQVKDRFTISRDDSKNTAYLQMNNLKTEDTAVYYCVRHANFGNSYISYWAYWGQGTLVTVSSGGGGSGGGGSGGGGSQTVVTQEPSLTVSPGGTVTLTCASSTGAVTSGNYPNWVQQKPGQAPRGLIGGTKFLVPGTPARFSGSLLGGKAALTLSGVQPEDEAEYYCTLWYSNRWVFGGGTKLTVLHHHHHH

SEQ ID NO: 3456 - protein, 513 aa, synthetic construct
  REGION 1..513: note = Description of Artificial Sequence: Synthetic polypeptide
EVQLLESGGGLVQPGGSLTLSCAASGRTFSSYAMGWFRQAPGMEREFVAAISWSGYSTYYADSVKGRFTISRDNSKNTLYLQMNSLRAEDTAVYYCAAGGSTRVVVTTTPVVKYWGQGTLVTVSSGGGGSGGGSEVQLVESGGGLVQPGNSLRLSCAASGFTFSKFGMSWVRQAPGKGLEWVSSISGSGRDTLYADSVKGRFTISRDNAKTTLYLQMNSLRPEDTAVYYCTIGGSLSVSSQGTLVTVSSGGGGSGGGSEVQLVESGGGLVQPGGSLKLSCAASGFTFNKYAINWVRQAPGKGLEWVARIRSKYNNYATYYADQVKDRFTISRDDSKNTAYLQMNNLKTEDTAVYYCVRHANFGNSYISYWAYWGQGTLVTVSSGGGGSGGGGSGGGGSQTVVTQEPSLTVSPGGTVTLTCASSTGAVTSGNYPNWVQQKPGQAPRGLIGGTKFLVPGTPARFSGSLLGGKAALTLSGVQPEDEAEYYCTLWYSNRWVFGGGTKLTVLHHHHHH

SEQ ID NO: 3457 - protein, 499 aa, synthetic construct
  REGION 1..499: note = Description of Artificial Sequence: Synthetic polypeptide
EVQLVESGGGLVQPGGSLTLSCAASGSTFSINHFSWYRQAPGKQRELVAFISSDGVSIDVESVKGRFTISGDNSKNTAYLQMNSLRAEDTAVYYCYYRGFWGQGTLVTVSSGGGGSGGGSEVQLVESGGGLVQPGNSLRLSCAASGFTFSKFGMSWVRQAPGKGLEWVSSISGSGRDTLYADSVKGRFTISRDNAKTTLYLQMNSLRPEDTAVYYCTIGGSLSVSSQGTLVTVSSGGGGSGGGSEVQLVESGGGLVQPGGSLKLSCAASGFTFNKYAINWVRQAPGKGLEWVARIRSKYNNYATYYADQVKDRFTISRDDSKNTAYLQMNNLKTEDTAVYYCVRHANFGNSYISYWAYWGQGTLVTVSSGGGGSGGGGSGGGGSQTVVTQEPSLTVSPGGTVTLTCASSTGAVTSGNYPNWVQQKPGQAPRGLIGGTKFLVPGTPARFSGSLLGGKAALTLSGVQPEDEAEYYCTLWYSNRWVFGGGTKLTVLHHHHHH

SEQ ID NO: 3458 - protein, 513 aa, synthetic construct
  REGION 1..513: note = Description of Artificial Sequence: Synthetic polypeptide
EVQLLESGGGLVQPGGSLTLSCAASGRTFSSYALGWFRQAPGKEREFVAAISWSGGNTYYADSVKGRFTISRDNSKNTLYLQMNSLRAEDTAVYYCAAGGSTRVVVTTTPVVKYWGQGTLVTVSSGGGGSGGGSEVQLVESGGGLVQPGNSLRLSCAASGFTFSKFGMSWVRQAPGKGLEWVSSISGSGRDTLYADSVKGRFTISRDNAKTTLYLQMNSLRPEDTAVYYCTIGGSLSVSSQGTLVTVSSGGGGSGGGSEVQLVESGGGLVQPGGSLKLSCAASGFTFNKYAINWVRQAPGKGLEWVARIRSKYNNYATYYADQVKDRFTISRDDSKNTAYLQMNNLKTEDTAVYYCVRHANFGNSYISYWAYWGQGTLVTVSSGGGGSGGGGSGGGGSQTVVTQEPSLTVSPGGTVTLTCASSTGAVTSGNYPNWVQQKPGQAPRGLIGGTKFLVPGTPARFSGSLLGGKAALTLSGVQPEDEAEYYCTLWYSNRWVFGGGTKLTVLHHHHHH

SEQ ID NO: 3459 - protein, 513 aa, synthetic construct
  REGION 1..513: note = Description of Artificial Sequence: Synthetic polypeptide
EVQLLESGGGLVQPGGSLTLSCAASERTFSSYTMGWFRQAPGKEREFVAAMSWSGGSTYYADSVKGRFTISRDNSKNTLYLQMNSLRAEDTAVYYCAAGGSTRVVVTTTPVVKYWGQGTLVTVSSGGGGSGGGSEVQLVESGGGLVQPGNSLRLSCAASGFTFSKFGMSWVRQAPGKGLEWVSSISGSGRDTLYADSVKGRFTISRDNAKTTLYLQMNSLRPEDTAVYYCTIGGSLSVSSQGTLVTVSSGGGGSGGGSEVQLVESGGGLVQPGGSLKLSCAASGFTFNKYAINWVRQAPGKGLEWVARIRSKYNNYATYYADQVKDRFTISRDDSKNTAYLQMNNLKTEDTAVYYCVRHANFGNSYISYWAYWGQGTLVTVSSGGGGSGGGGSGGGGSQTVVTQEPSLTVSPGGTVTLTCASSTGAVTSGNYPNWVQQKPGQAPRGLIGGTKFLVPGTPARFSGSLLGGKAALTLSGVQPEDEAEYYCTLWYSNRWVFGGGTKLTVLHHHHHH

SEQ ID NO: 3460 - protein, 513 aa, synthetic construct
  REGION 1..513: note = Description of Artificial Sequence: Synthetic polypeptide
EVQLLESGGGLVQPGGSLTLSCAASGRTFSSYAMGWFRQAPGKEREFVAAISWSGSSTYYADSVKGRFTISRDNSKNTLYLQMNSLRAEDTAVYYCAAGGSTRVVVTTTPVVKYWGQGTLVTVSSGGGGSGGGSEVQLVESGGGLVQPGNSLRLSCAASGFTFSKFGMSWVRQAPGKGLEWVSSISGSGRDTLYADSVKGRFTISRDNAKTTLYLQMNSLRPEDTAVYYCTIGGSLSVSSQGTLVTVSSGGGGSGGGSEVQLVESGGGLVQPGGSLKLSCAASGFTFNKYAINWVRQAPGKGLEWVARIRSKYNNYATYYADQVKDRFTISRDDSKNTAYLQMNNLKTEDTAVYYCVRHANFGNSYISYWAYWGQGTLVTVSSGGGGSGGGGSGGGGSQTVVTQEPSLTVSPGGTVTLTCASSTGAVTSGNYPNWVQQKPGQAPRGLIGGTKFLVPGTPARFSGSLLGGKAALTLSGVQPEDEAEYYCTLWYSNRWVFGGGTKLTVLHHHHHH

SEQ ID NO: 3461 - protein, 505 aa, synthetic construct
  REGION 1..505: note = Description of Artificial Sequence: Synthetic polypeptide
EVQLVESGGGLVQPGGSLKLSCAASGFTFNKYAINWVRQAPGKGLEWVARIRSKYNNYATYYADQVKDRFTISRDDSKNTAYLQMNNLKTEDTAVYYCVRHANFGNSYISYWAYWGQGTLVTVSSGGGGSGGGGSGGGGSQTVVTQEPSLTVSPGGTVTLTCASSTGAVTSGNYPNWVQQKPGQAPRGLIGGTKFLVPGTPARFSGSLLGGKAALTLSGVQPEDEAEYYCTLWYSNRWVFGGGTKLTVLGGGGSGGGSEVQLVESGGGLVQPGNSLRLSCAASGFTFSKFGMSWVRQAPGKGLEWVSSISGSGRDTLYADSVKGRFTISRDNAKTTLYLQMNSLRPEDTAVYYCTIGGSLSVSSQGTLVTVSSGGGGSGGGSEVQLVESGGGLVQPGGSLTLSCAASSSSVSLLSLAWYRQAPGKKRELVAGISDDGSIVYMDSVKGRFTISRDNAKNSVYLQMNSLRAEDTAVYYCYAYSWITRSPYWGQGTLVTVSSHHHHHH

SEQ ID NO: 3462 - protein, 505 aa, synthetic construct
  REGION 1..505: note = Description of Artificial Sequence: Synthetic polypeptide
EVQLVESGGGLVQPGGSLTLSCAASSSSVSLLSLAWYRQAPGKKRELVAGISDDGSIVYMDSVKGRFTISRDNAKNSVYLQMNSLRAEDTAVYYCYAYSWITRSPYWGQGTLVTVSSGGGGSGGGSEVQLVESGGGLVQPGNSLRLSCAASGFTFSKFGMSWVRQAPGKGLEWVSSISGSGRDTLYADSVKGRFTISRDNAKTTLYLQMNSLRPEDTAVYYCTIGGSLSVSSQGTLVTVSSGGGGSGGGSEVQLVESGGGLVQPGGSLKLSCAASGFTFNKYAINWVRQAPGKGLEWVARIRSKYNNYATYYADQVKDRFTISRDDSKNTAYLQMNNLKTEDTAVYYCVRHANFGNSYISYWAYWGQGTLVTVSSGGGGSGGGGSGGGGSQTVVTQEPSLTVSPGGTVTLTCASSTGAVTSGNYPNWVQQKPGQAPRGLIGGTKFLVPGTPARFSGSLLGGKAALTLSGVQPEDEAEYYCTLWYSNRWVFGGGTKLTVLHHHHHH

SEQ ID NO: 3463-3494 - skipped (32 entries)

SEQ ID NO: 3495 - protein, 127 aa, synthetic construct
  REGION 1..127: note = Description of Artificial Sequence: Synthetic polypeptide
EVQLLESGGGLVQPGGSLTLSCAASGGTWSSYATGWFRQAPGKERELIAGISRSGGRTYYADSVKGRFTISRDNSKNTLYLQMNSLRAEDTAVYYCAAARYFTSSVVYTSGNDYDYWGQGTLVTVSS

SEQ ID NO: 3496 - protein, 127 aa, synthetic construct
  REGION 1..127: note = Description of Artificial Sequence: Synthetic polypeptide
EVQLLESGGGLVQPGGSLTLSCAASGGTWSSYATGWFRQAPGKERELIAGISRSGGRTYYADSVKGRFTISRDNSKNTVYLQMNSLRAEDTAVYYCAKARYFTSSVVYTSGNDYDYWGQGTLVTVSS

SEQ ID NO: 3497 - protein, 10 aa, synthetic construct
  REGION 1..10: note = Description of Artificial Sequence: Synthetic peptide
GGTWSSYATG

SEQ ID NO: 3498 - protein, 10 aa, synthetic construct
  REGION 1..10: note = Description of Artificial Sequence: Synthetic peptide
GGTWSSYATG

SEQ ID NO: 3499 - protein, 17 aa, synthetic construct
  REGION 1..17: note = Description of Artificial Sequence: Synthetic peptide
GISRSGGRTYYADSVKG

SEQ ID NO: 3500 - protein, 17 aa, synthetic construct
  REGION 1..17: note = Description of Artificial Sequence: Synthetic peptide
GISRSGGRTYYADSVKG

SEQ ID NO: 3501 - protein, 18 aa, synthetic construct
  REGION 1..18: note = Description of Artificial Sequence: Synthetic peptide
ARYFTSSVVYTSGNDYDY

SEQ ID NO: 3502 - protein, 18 aa, synthetic construct
  REGION 1..18: note = Description of Artificial Sequence: Synthetic peptide
ARYFTSSVVYTSGNDYDY

SEQ ID NO: 3503 - protein, 6 aa, synthetic construct
  REGION 1..6: note = Description of Artificial Sequence: Synthetic 6x His tag
HHHHHH

SEQ ID NO: 3504 - skipped

SEQ ID NO: 3505 - protein, 10 aa, synthetic construct
  REGION 1..10: note = Description of Artificial Sequence: Synthetic peptide
INSSGSTNYG

SEQ ID NO: 3506 - protein, 10 aa, synthetic construct
  REGION 1..10: note = Description of Artificial Sequence: Synthetic peptide
NAGGGPLGSR

SEQ ID NO: 3507 - protein, 10 aa, synthetic construct
  REGION 1..10: note = Description of Artificial Sequence: Synthetic peptide
ISSGGSTNVR

SEQ ID NO: 3508 - protein, 10 aa, synthetic construct
  REGION 1..10: note = Description of Artificial Sequence: Synthetic peptide
NADTIGTARD

SEQ ID NO: 3509 - protein, 618 aa, Homo sapiens; identical to SEQ ID NO: 3216

SEQ ID NO: 3510-3599 - skipped (90 entries)

SEQ ID NO: 3600 - protein, 523 aa, synthetic construct
  REGION 1..523: note = Description of Artificial Sequence: Synthetic polypeptide
QDGNEEGGGGKPLGLQARVVGGGGEVQLVESGGGLVQPGGSLTLSCAASRFMISEYHMHWVRQAPGKGLEWVSTINPAGTTDYAESVKGRFTISRDNAKNTLYLQMNSLKPEDTAVYYCDSYGYRGQGTQVTVSSGGGGSGGGSEVQLVESGGGLVQPGNSLRLSCAASGFTFSKFGMSWVRQAPGKGLEWVSSISGSGRDTLYADSVKGRFTISRDNAKTTLYLQMNSLRPEDTAVYYCTIGGSLSVSSQGTLVTVSSGGGGSGGGSEVQLVESGGGLVQPGGSLKLSCAASGFTFNKYAINWVRQAPGKGLEWVARIRSKYNNYATYYADQVKDRFTISRDDSKNTAYLQMNNLKTEDTAVYYCVRHANFGNSYISYWAYWGQGTLVTVSSGGGGSGGGGSGGGGSQTVVTQEPSLTVSPGGTVTLTCASSTGAVTSGNYPNWVQQKPGQAPRGLIGGTKFLVPGTPARFSGSLLGGKAALTLSGVQPEDEAEYYCTLWYSNRWVFGGGTKLTVLHHHHHH

SEQ ID NO: 3601 - protein, 523 aa, synthetic construct
  REGION 1..523: note = Description of Artificial Sequence: Synthetic polypeptide
QDGNEEGGGGSGGGGSGGGGSGGGEVQLVESGGGLVQPGGSLTLSCAASRFMISEYHMHWVRQAPGKGLEWVSTINPAGTTDYAESVKGRFTISRDNAKNTLYLQMNSLKPEDTAVYYCDSYGYRGQGTQVTVSSGGGGSGGGSEVQLVESGGGLVQPGNSLRLSCAASGFTFSKFGMSWVRQAPGKGLEWVSSISGSGRDTLYADSVKGRFTISRDNAKTTLYLQMNSLRPEDTAVYYCTIGGSLSVSSQGTLVTVSSGGGGSGGGSEVQLVESGGGLVQPGGSLKLSCAASGFTFNKYAINWVRQAPGKGLEWVARIRSKYNNYATYYADQVKDRFTISRDDSKNTAYLQMNNLKTEDTAVYYCVRHANFGNSYISYWAYWGQGTLVTVSSGGGGSGGGGSGGGGSQTVVTQEPSLTVSPGGTVTLTCASSTGAVTSGNYPNWVQQKPGQAPRGLIGGTKFLVPGTPARFSGSLLGGKAALTLSGVQPEDEAEYYCTLWYSNRWVFGGGTKLTVLHHHHHH

SEQ ID NO: 3602 - protein, 523 aa, synthetic construct
  REGION 1..523: note = Description of Artificial Sequence: Synthetic polypeptide
LDGNEEGGGGSGGGGSGGGGSGGGEVQLVESGGGLVQPGGSLTLSCAASRFMISEYHMHWVRQAPGKGLEWVSTINPAGTTDYAESVKGRFTISRDNAKNTLYLQMNSLKPEDTAVYYCDSYGYRGQGTQVTVSSGGGGSGGGSEVQLVESGGGLVQPGNSLRLSCAASGFTFSKFGMSWVRQAPGKGLEWVSSISGSGRDTLYADSVKGRFTISRDNAKTTLYLQMNSLRPEDTAVYYCTIGGSLSVSSQGTLVTVSSGGGGSGGGSEVQLVESGGGLVQPGGSLKLSCAASGFTFNKYAINWVRQAPGKGLEWVARIRSKYNNYATYYADQVKDRFTISRDDSKNTAYLQMNNLKTEDTAVYYCVRHANFGNSYISYWAYWGQGTLVTVSSGGGGSGGGGSGGGGSQTVVTQEPSLTVSPGGTVTLTCASSTGAVTSGNYPNWVQQKPGQAPRGLIGGTKFLVPGTPARFSGSLLGGKAALTLSGVQPEDEAEYYCTLWYSNRWVFGGGTKLTVLHHHHHH

SEQ ID NO: 3603 - protein, 523 aa, synthetic construct
  REGION 1..523: note = Description of Artificial Sequence: Synthetic polypeptide
PDGNEEGGGGSGGGGSGGGGSGGGEVQLVESGGGLVQPGGSLTLSCAASRFMISEYHMHWVRQAPGKGLEWVSTINPAGTTDYAESVKGRFTISRDNAKNTLYLQMNSLKPEDTAVYYCDSYGYRGQGTQVTVSSGGGGSGGGSEVQLVESGGGLVQPGNSLRLSCAASGFTFSKFGMSWVRQAPGKGLEWVSSISGSGRDTLYADSVKGRFTISRDNAKTTLYLQMNSLRPEDTAVYYCTIGGSLSVSSQGTLVTVSSGGGGSGGGSEVQLVESGGGLVQPGGSLKLSCAASGFTFNKYAINWVRQAPGKGLEWVARIRSKYNNYATYYADQVKDRFTISRDDSKNTAYLQMNNLKTEDTAVYYCVRHANFGNSYISYWAYWGQGTLVTVSSGGGGSGGGGSGGGGSQTVVTQEPSLTVSPGGTVTLTCASSTGAVTSGNYPNWVQQKPGQAPRGLIGGTKFLVPGTPARFSGSLLGGKAALTLSGVQPEDEAEYYCTLWYSNRWVFGGGTKLTVLHHHHHH

SEQ ID NO: 3604 - protein, 523 aa, synthetic construct
  REGION 1..523: note = Description of Artificial Sequence: Synthetic polypeptide
DDGNEEGGGGSGGGGSGGGGSGGGEVQLVESGGGLVQPGGSLTLSCAASRFMISEYHMHWVRQAPGKGLEWVSTINPAGTTDYAESVKGRFTISRDNAKNTLYLQMNSLKPEDTAVYYCDSYGYRGQGTQVTVSSGGGGSGGGSEVQLVESGGGLVQPGNSLRLSCAASGFTFSKFGMSWVRQAPGKGLEWVSSISGSGRDTLYADSVKGRFTISRDNAKTTLYLQMNSLRPEDTAVYYCTIGGSLSVSSQGTLVTVSSGGGGSGGGSEVQLVESGGGLVQPGGSLKLSCAASGFTFNKYAINWVRQAPGKGLEWVARIRSKYNNYATYYADQVKDRFTISRDDSKNTAYLQMNNLKTEDTAVYYCVRHANFGNSYISYWAYWGQGTLVTVSSGGGGSGGGGSGGGGSQTVVTQEPSLTVSPGGTVTLTCASSTGAVTSGNYPNWVQQKPGQAPRGLIGGTKFLVPGTPARFSGSLLGGKAALTLSGVQPEDEAEYYCTLWYSNRWVFGGGTKLTVLHHHHHH

SEQ ID NO: 3605 - protein, 523 aa, synthetic construct
  REGION 1..523: note = Description of Artificial Sequence: Synthetic polypeptide
EDGNEEGGGGSGGGGSGGGGSGGGEVQLVESGGGLVQPGGSLTLSCAASRFMISEYHMHWVRQAPGKGLEWVSTINPAGTTDYAESVKGRFTISRDNAKNTLYLQMNSLKPEDTAVYYCDSYGYRGQGTQVTVSSGGGGSGGGSEVQLVESGGGLVQPGNSLRLSCAASGFTFSKFGMSWVRQAPGKGLEWVSSISGSGRDTLYADSVKGRFTISRDNAKTTLYLQMNSLRPEDTAVYYCTIGGSLSVSSQGTLVTVSSGGGGSGGGSEVQLVESGGGLVQPGGSLKLSCAASGFTFNKYAINWVRQAPGKGLEWVARIRSKYNNYATYYADQVKDRFTISRDDSKNTAYLQMNNLKTEDTAVYYCVRHANFGNSYISYWAYWGQGTLVTVSSGGGGSGGGGSGGGGSQTVVTQEPSLTVSPGGTVTLTCASSTGAVTSGNYPNWVQQKPGQAPRGLIGGTKFLVPGTPARFSGSLLGGKAALTLSGVQPEDEAEYYCTLWYSNRWVFGGGTKLTVLHHHHHH

SEQ ID NO: 3606 - protein, 523 aa, synthetic construct
  REGION 1..523: note = Description of Artificial Sequence: Synthetic polypeptide
QEGNEEGGGGSGGGGSGGGGSGGGEVQLVESGGGLVQPGGSLTLSCAASRFMISEYHMHWVRQAPGKGLEWVSTINPAGTTDYAESVKGRFTISRDNAKNTLYLQMNSLKPEDTAVYYCDSYGYRGQGTQVTVSSGGGGSGGGSEVQLVESGGGLVQPGNSLRLSCAASGFTFSKFGMSWVRQAPGKGLEWVSSISGSGRDTLYADSVKGRFTISRDNAKTTLYLQMNSLRPEDTAVYYCTIGGSLSVSSQGTLVTVSSGGGGSGGGSEVQLVESGGGLVQPGGSLKLSCAASGFTFNKYAINWVRQAPGKGLEWVARIRSKYNNYATYYADQVKDRFTISRDDSKNTAYLQMNNLKTEDTAVYYCVRHANFGNSYISYWAYWGQGTLVTVSSGGGGSGGGGSGGGGSQTVVTQEPSLTVSPGGTVTLTCASSTGAVTSGNYPNWVQQKPGQAPRGLIGGTKFLVPGTPARFSGSLLGGKAALTLSGVQPEDEAEYYCTLWYSNRWVFGGGTKLTVLHHHHHH

SEQ ID NO: 3607 - protein, 523 aa, synthetic construct
  REGION 1..523: note = Description of Artificial Sequence: Synthetic polypeptide
QDANEEGGGGSGGGGSGGGGSGGGEVQLVESGGGLVQPGGSLTLSCAASRFMISEYHMHWVRQAPGKGLEWVSTINPAGTTDYAESVKGRFTISRDNAKNTLYLQMNSLKPEDTAVYYCDSYGYRGQGTQVTVSSGGGGSGGGSEVQLVESGGGLVQPGNSLRLSCAASGFTFSKFGMSWVRQAPGKGLEWVSSISGSGRDTLYADSVKGRFTISRDNAKTTLYLQMNSLRPEDTAVYYCTIGGSLSVSSQGTLVTVSSGGGGSGGGSEVQLVESGGGLVQPGGSLKLSCAASGFTFNKYAINWVRQAPGKGLEWVARIRSKYNNYATYYADQVKDRFTISRDDSKNTAYLQMNNLKTEDTAVYYCVRHANFGNSYISYWAYWGQGTLVTVSSGGGGSGGGGSGGGGSQTVVTQEPSLTVSPGGTVTLTCASSTGAVTSGNYPNWVQQKPGQAPRGLIGGTKFLVPGTPARFSGSLLGGKAALTLSGVQPEDEAEYYCTLWYSNRWVFGGGTKLTVLHHHHHH

SEQ ID NO: 3608 - protein, 523 aa, synthetic construct
  REGION 1..523: note = Description of Artificial Sequence: Synthetic polypeptide
QDSNEEGGGGSGGGGSGGGGSGGGEVQLVESGGGLVQPGGSLTLSCAASRFMISEYHMHWVRQAPGKGLEWVSTINPAGTTDYAESVKGRFTISRDNAKNTLYLQMNSLKPEDTAVYYCDSYGYRGQGTQVTVSSGGGGSGGGSEVQLVESGGGLVQPGNSLRLSCAASGFTFSKFGMSWVRQAPGKGLEWVSSISGSGRDTLYADSVKGRFTISRDNAKTTLYLQMNSLRPEDTAVYYCTIGGSLSVSSQGTLVTVSSGGGGSGGGSEVQLVESGGGLVQPGGSLKLSCAASGFTFNKYAINWVRQAPGKGLEWVARIRSKYNNYATYYADQVKDRFTISRDDSKNTAYLQMNNLKTEDTAVYYCVRHANFGNSYISYWAYWGQGTLVTVSSGGGGSGGGGSGGGGSQTVVTQEPSLTVSPGGTVTLTCASSTGAVTSGNYPNWVQQKPGQAPRGLIGGTKFLVPGTPARFSGSLLGGKAALTLSGVQPEDEAEYYCTLWYSNRWVFGGGTKLTVLHHHHHH

SEQ ID NO: 3609 - protein, 503 aa, synthetic construct
  REGION 1..503: note = Description of Artificial Sequence: Synthetic polypeptide
SGGGEVQLVESGGGLVQPGGSLTLSCAASRFMISEYHMHWVRQAPGKGLEWVSTINPAGTTDYAESVKGRFTISRDNAKNTLYLQMNSLKPEDTAVYYCDSYGYRGQGTQVTVSSGGGGSGGGSEVQLVESGGGLVQPGNSLRLSCAASGFTFSKFGMSWVRQAPGKGLEWVSSISGSGRDTLYADSVKGRFTISRDNAKTTLYLQMNSLRPEDTAVYYCTIGGSLSVSSQGTLVTVSSGGGGSGGGSEVQLVESGGGLVQPGGSLKLSCAASGFTFNKYAINWVRQAPGKGLEWVARIRSKYNNYATYYADQVKDRFTISRDDSKNTAYLQMNNLKTEDTAVYYCVRHANFGNSYISYWAYWGQGTLVTVSSGGGGSGGGGSGGGGSQTVVTQEPSLTVSPGGTVTLTCASSTGAVTSGNYPNWVQQKPGQAPRGLIGGTKFLVPGTPARFSGSLLGGKAALTLSGVQPEDEAEYYCTLWYSNRWVFGGGTKLTVLHHHHHH

SEQ ID NO: 3610 - protein, 640 aa, synthetic construct
  REGION 1..640: note = Description of Artificial Sequence: Synthetic polypeptide
EVQLVESGGGLVQPGNSLRLSCAASGFTFSKFGMSWVRQGGGGGLDGNEEPGGLEWVSSISGSGRDTLYADSVKGRFTISRDNAKTTLYLQMNSLRPEDTAVYYCTIGGSLSVSSQGTLVTVSGGGGSGGGGSGGGGSGGGEVQLVESGGGLVQPGGSLTLSCAASRFMISEYHMHWVRQAPGKGLEWVSTINPAGTTDYAESVKGRFTISRDNAKNTLYLQMNSLKPEDTAVYYCDSYGYRGQGTQVTVSSGGGGSGGGSEVQLVESGGGLVQPGNSLRLSCAASGFTFSKFGMSWVRQAPGKGLEWVSSISGSGRDTLYADSVKGRFTISRDNAKTTLYLQMNSLRPEDTAVYYCTIGGSLSVSSQGTLVTVSSGGGGSGGGSEVQLVESGGGLVQPGGSLKLSCAASGFTFNKYAINWVRQAPGKGLEWVARIRSKYNNYATYYADQVKDRFTISRDDSKNTAYLQMNNLKTEDTAVYYCVRHANFGNSYISYWAYWGQGTLVTVSSGGGGSGGGGSGGGGSQTVVTQEPSLTVSPGGTVTLTCASSTGAVTSGNYPNWVQQKPGQAPRGLIGGTKFLVPGTPARFSGSLLGGKAALTLSGVQPEDEAEYYCTLWYSNRWVFGGGTKLTVLHHHHHH

SEQ ID NO: 3611 - protein, 635 aa, synthetic construct
  REGION 1..635: note = Description of Artificial Sequence: Synthetic polypeptide
VVGGGGENVLTQSPATLSVTPGEKATITCRASQSVSYMHWYQQKPGQAPRLLIYDASNRASGVPSRFSGSGSGTDHTLTISSLEAEDAATYYCFQGSVYPFTFGQGTKLEIKGGGGSGGGGSGGGGSQVTLRESGPALVKPTQTLTLTCTFSGFSLSTSGMGVGWIRQPPGKALEWLAHIWWDDDKRYNPALKSRLTISKDTSKNQVFLTMTNMDPVDTATYYCARMELWSYYFDYWGQGTTVTVSSGGGGSGGGSEVQLVESGGGLVQPGNSLRLSCAASGFTFSKFGMSWVRQAPGKGLEWVSSISGSGRDTLYADSVKGRFTISRDNAKTTLYLQMNSLRPEDTAVYYCTIGGSLSVSSQGTLVTVSSGGGGSGGGSEVQLVESGGGLVQPGGSLKLSCAASGFTFNKYAINWVRQAPGKGLEWVARIRSKYNNYATYYADQVKDRFTISRDDSKNTAYLQMNNLKTEDTAVYYCVRHANFGNSYISYWAYWGQGTLVTVSSGGGGSGGGGSGGGGSQTVVTQEPSLTVSPGGTVTLTCASSTGAVTSGNYPNWVQQKPGQAPRGLIGGTKFLVPGTPARFSGSLLGGKAALTLSGVQPEDEAEYYCTLWYSNRWVFGGGTKLTVLHHHHHH

SEQ ID NO: 3612 - protein, 519 aa, synthetic construct
  REGION 1..519: note = Description of Artificial Sequence: Synthetic polypeptide
VVGGGGEVQLLESGGGLVQPGGSLTLSCAASGRTFSSYAMGWFRQAPGKEREFVAAISWSGSNTYYADSVKGRFTISRDNSKNTLYLQMNSLRAEDTAVYYCAAGGSTRVVVTTTPVVKYWGQGTLVTVSSGGGGSGGGSEVQLVESGGGLVQPGNSLRLSCAASGFTFSKFGMSWVRQAPGKGLEWVSSISGSGRDTLYADSVKGRFTISRDNAKTTLYLQMNSLRPEDTAVYYCTIGGSLSVSSQGTLVTVSSGGGGSGGGSEVQLVESGGGLVQPGGSLKLSCAASGFTFNKYAINWVRQAPGKGLEWVARIRSKYNNYATYYADQVKDRFTISRDDSKNTAYLQMNNLKTEDTAVYYCVRHANFGNSYISYWAYWGQGTLVTVSSGGGGSGGGGSGGGGSQTVVTQEPSLTVSPGGTVTLTCASSTGAVTSGNYPNWVQQKPGQAPRGLIGGTKFLVPGTPARFSGSLLGGKAALTLSGVQPEDEAEYYCTLWYSNRWVFGGGTKLTVLHHHHHH

SEQ ID NO: 3613 - protein, 505 aa, synthetic construct
  REGION 1..505: note = Description of Artificial Sequence: Synthetic polypeptide
VVGGGGEVQLVESGGGLVQPGGSLTLSCAASGSTFSINHFSWYRQAPGKQRELVAFISSDGVSIDVESVKGRFTISGDNSKNTAYLQMNSLRAEDTAVYYCYYRGFWGQGTLVTVSSGGGGSGGGSEVQLVESGGGLVQPGNSLRLSCAASGFTFSKFGMSWVRQAPGKGLEWVSSISGSGRDTLYADSVKGRFTISRDNAKTTLYLQMNSLRPEDTAVYYCTIGGSLSVSSQGTLVTVSSGGGGSGGGSEVQLVESGGGLVQPGGSLKLSCAASGFTFNKYAINWVRQAPGKGLEWVARIRSKYNNYATYYADQVKDRFTISRDDSKNTAYLQMNNLKTEDTAVYYCVRHANFGNSYISYWAYWGQGTLVTVSSGGGGSGGGGSGGGGSQTVVTQEPSLTVSPGGTVTLTCASSTGAVTSGNYPNWVQQKPGQAPRGLIGGTKFLVPGTPARFSGSLLGGKAALTLSGVQPEDEAEYYCTLWYSNRWVFGGGTKLTVLHHHHHH

SEQ ID NO: 3614 - protein, 662 aa, synthetic construct
  REGION 1..662: note = Description of Artificial Sequence: Synthetic polypeptide
QDGNEEGGGGSGGGGSGGGGSGGGEVQLVESGGGLVQPGNSLRLSCAASGFTFSKFGMSWVRQAPGKGLEWVSSISGSGRDTLYADSVKGRFTISRDNAKTTLYLQMNSLRPEDTAVYYCTIGGSLSVSSQGTLVTVSSGGGGSGGGSEVQLVESGGGLVQPGGSLKLSCAASGFTFNKYAINWVRQAPGKGLEWVARIRSKYNNYATYYADQVKDRFTISRDDSKNTAYLQMNNLKTEDTAVYYCVRHANFGNSYISYWAYWGQGTLVTVSSGGGGSGGGGSGGGGSQTVVTQEPSLTVSPGGTVTLTCASSTGAVTSGNYPNWVQQKPGQAPRGLIGGTKFLVPGTPARFSGSLLGGKAALTLSGVQPEDEAEYYCTLWYSNRWVFGGGTKLTVLGGGGSGGGSQVQLVQSGAEVKKPGESVKVSCKASGYTFTNYGMNWVKQAPGQGLEWMGWINTYTGEPTYADKFQGRVTMTTDTSTSTAYMEIRNLGGDDTAVYYCARWSWSDGYYVYFDYWGQGTSVTVSSGGGGSGGGGSGGGGSDIVMTQSPDSLTVSLGERTTINCKSSQSVLDSSTNKNSLAWYQQKPGQPPKLLLSWASTRESGIPDRFSGSGSGTDFTLTIDSPQPEDSATYYCQQSAHFPITFGQGTRLEIKHHHHHH

SEQ ID NO: 3615 - protein, 662 aa, synthetic construct
  REGION 1..662: note = Description of Artificial Sequence: Synthetic polypeptide
QDGNEEGGGGSGGGGSGGGGSGGGEVQLVESGGGLVQPGNSLRLSCAASGFTFSKFGMSWVRQAPGKGLEWVSSISGSGRDTLYADSVKGRFTISRDNAKTTLYLQMNSLRPEDTAVYYCTIGGSLSVSSQGTLVTVSSGGGGSGGGSQVQLVQSGAEVKKPGESVKVSCKASGYTFTNYGMNWVKQAPGQGLEWMGWINTYTGEPTYADKFQGRVTMTTDTSTSTAYMEIRNLGGDDTAVYYCARWSWSDGYYVYFDYWGQGTSVTVSSGGGGSGGGGSGGGGSDIVMTQSPDSLTVSLGERTTINCKSSQSVLDSSTNKNSLAWYQQKPGQPPKLLLSWASTRESGIPDRFSGSGSGTDFTLTIDSPQPEDSATYYCQQSAHFPITFGQGTRLEIKGGGGSGGGSEVQLVESGGGLVQPGGSLKLSCAASGFTFNKYAINWVRQAPGKGLEWVARIRSKYNNYATYYADQVKDRFTISRDDSKNTAYLQMNNLKTEDTAVYYCVRHANFGNSYISYWAYWGQGTLVTVSSGGGGSGGGGSGGGGSQTVVTQEPSLTVSPGGTVTLTCASSTGAVTSGNYPNWVQQKPGQAPRGLIGGTKFLVPGTPARFSGSLLGGKAALTLSGVQPEDEAEYYCTLWYSNRWVFGGGTKLTVLHHHHHH

SEQ ID NO: 3616 - protein, 662 aa, synthetic construct
  REGION 1..662: note = Description of Artificial Sequence: Synthetic polypeptide
QDGNEEGGGGSGGGGSGGGGSGGGEVQLVESGGGLVQPGGSLKLSCAASGFTFNKYAINWVRQAPGKGLEWVARIRSKYNNYATYYADQVKDRFTISRDDSKNTAYLQMNNLKTEDTAVYYCVRHANFGNSYISYWAYWGQGTLVTVSSGGGGSGGGGSGGGGSQTVVTQEPSLTVSPGGTVTLTCASSTGAVTSGNYPNWVQQKPGQAPRGLIGGTKFLVPGTPARFSGSLLGGKAALTLSGVQPEDEAEYYCTLWYSNRWVFGGGTKLTVLGGGGSGGGSEVQLVESGGGLVQPGNSLRLSCAASGFTFSKFGMSWVRQAPGKGLEWVSSISGSGRDTLYADSVKGRFTISRDNAKTTLYLQMNSLRPEDTAVYYCTIGGSLSVSSQGTLVTVSSGGGGSGGGSQVQLVQSGAEVKKPGESVKVSCKASGYTFTNYGMNWVKQAPGQGLEWMGWINTYTGEPTYADKFQGRVTMTTDTSTSTAYMEIRNLGGDDTAVYYCARWSWSDGYYVYFDYWGQGTSVTVSSGGGGSGGGGSGGGGSDIVMTQSPDSLTVSLGERTTINCKSSQSVLDSSTNKNSLAWYQQKPGQPPKLLLSWASTRESGIPDRFSGSGSGTDFTLTIDSPQPEDSATYYCQQSAHFPITFGQGTRLEIKHHHHHH

SEQ ID NO: 3617 - protein, 662 aa, synthetic construct
  REGION 1..662: note = Description of Artificial Sequence: Synthetic polypeptide
QDGNEEGGGGSGGGGSGGGGSGGGEVQLVESGGGLVQPGGSLKLSCAASGFTFNKYAINWVRQAPGKGLEWVARIRSKYNNYATYYADQVKDRFTISRDDSKNTAYLQMNNLKTEDTAVYYCVRHANFGNSYISYWAYWGQGTLVTVSSGGGGSGGGGSGGGGSQTVVTQEPSLTVSPGGTVTLTCASSTGAVTSGNYPNWVQQKPGQAPRGLIGGTKFLVPGTPARFSGSLLGGKAALTLSGVQPEDEAEYYCTLWYSNRWVFGGGTKLTVLGGGGSGGGSQVQLVQSGAEVKKPGESVKVSCKASGYTFTNYGMNWVKQAPGQGLEWMGWINTYTGEPTYADKFQGRVTMTTDTSTSTAYMEIRNLGGDDTAVYYCARWSWSDGYYVYFDYWGQGTSVTVSSGGGGSGGGGSGGGGSDIVMTQSPDSLTVSLGERTTINCKSSQSVLDSSTNKNSLAWYQQKPGQPPKLLLSWASTRESGIPDRFSGSGSGTDFTLTIDSPQPEDSATYYCQQSAHFPITFGQGTRLEIKGGGGSGGGSEVQLVESGGGLVQPGNSLRLSCAASGFTFSKFGMSWVRQAPGKGLEWVSSISGSGRDTLYADSVKGRFTISRDNAKTTLYLQMNSLRPEDTAVYYCTIGGSLSVSSQGTLVTVSSHHHHHH

SEQ ID NO: 3618 - protein, 662 aa, synthetic construct
  REGION 1..662: note = Description of Artificial Sequence: Synthetic polypeptide
QDGNEEGGGGSGGGGSGGGGSGGGQVQLVQSGAEVKKPGESVKVSCKASGYTFTNYGMNWVKQAPGQGLEWMGWINTYTGEPTYADKFQGRVTMTTDTSTSTAYMEIRNLGGDDTAVYYCARWSWSDGYYVYFDYWGQGTSVTVSSGGGGSGGGGSGGGGSDIVMTQSPDSLTVSLGERTTINCKSSQSVLDSSTNKNSLAWYQQKPGQPPKLLLSWASTRESGIPDRFSGSGSGTDFTLTIDSPQPEDSATYYCQQSAHFPITFGQGTRLEIKGGGGSGGGSEVQLVESGGGLVQPGNSLRLSCAASGFTFSKFGMSWVRQAPGKGLEWVSSISGSGRDTLYADSVKGRFTISRDNAKTTLYLQMNSLRPEDTAVYYCTIGGSLSVSSQGTLVTVSSGGGGSGGGSEVQLVESGGGLVQPGGSLKLSCAASGFTFNKYAINWVRQAPGKGLEWVARIRSKYNNYATYYADQVKDRFTISRDDSKNTAYLQMNNLKTEDTAVYYCVRHANFGNSYISYWAYWGQGTLVTVSSGGGGSGGGGSGGGGSQTVVTQEPSLTVSPGGTVTLTCASSTGAVTSGNYPNWVQQKPGQAPRGLIGGTKFLVPGTPARFSGSLLGGKAALTLSGVQPEDEAEYYCTLWYSNRWVFGGGTKLTVLHHHHHH

SEQ ID NO: 3619 - protein, 662 aa, synthetic construct
  REGION 1..662: note = Description of Artificial Sequence: Synthetic polypeptide
QDGNEEGGGGSGGGGSGGGGSGGGQVQLVQSGAEVKKPGESVKVSCKASGYTFTNYGMNWVKQAPGQGLEWMGWINTYTGEPTYADKFQGRVTMTTDTSTSTAYMEIRNLGGDDTAVYYCARWSWSDGYYVYFDYWGQGTSVTVSSGGGGSGGGGSGGGGSDIVMTQSPDSLTVSLGERTTINCKSSQSVLDSSTNKNSLAWYQQKPGQPPKLLLSWASTRESGIPDRFSGSGSGTDFTLTIDSPQPEDSATYYCQQSAHFPITFGQGTRLEIKGGGGSGGGSEVQLVESGGGLVQPGGSLKLSCAASGFTFNKYAINWVRQAPGKGLEWVARIRSKYNNYATYYADQVKDRFTISRDDSKNTAYLQMNNLKTEDTAVYYCVRHANFGNSYISYWAYWGQGTLVTVSSGGGGSGGGGSGGGGSQTVVTQEPSLTVSPGGTVTLTCASSTGAVTSGNYPNWVQQKPGQAPRGLIGGTKFLVPGTPARFSGSLLGGKAALTLSGVQPEDEAEYYCTLWYSNRWVFGGGTKLTVLGGGGSGGGSEVQLVESGGGLVQPGNSLRLSCAASGFTFSKFGMSWVRQAPGKGLEWVSSISGSGRDTLYADSVKGRFTISRDNAKTTLYLQMNSLRPEDTAVYYCTIGGSLSVSSQGTLVTVSSHHHHHH

SEQ ID NO: 3620 - protein, 644 aa, synthetic construct
  REGION 1..644: note = Description of Artificial Sequence: Synthetic polypeptide
VVGGGGEVQLVESGGGLVQPGNSLRLSCAASGFTFSKFGMSWVRQAPGKGLEWVSSISGSGRDTLYADSVKGRFTISRDNAKTTLYLQMNSLRPEDTAVYYCTIGGSLSVSSQGTLVTVSSGGGGSGGGSEVQLVESGGGLVQPGGSLKLSCAASGFTFNKYAINWVRQAPGKGLEWVARIRSKYNNYATYYADQVKDRFTISRDDSKNTAYLQMNNLKTEDTAVYYCVRHANFGNSYISYWAYWGQGTLVTVSSGGGGSGGGGSGGGGSQTVVTQEPSLTVSPGGTVTLTCASSTGAVTSGNYPNWVQQKPGQAPRGLIGGTKFLVPGTPARFSGSLLGGKAALTLSGVQPEDEAEYYCTLWYSNRWVFGGGTKLTVLGGGGSGGGSQVQLVQSGAEVKKPGESVKVSCKASGYTFTNYGMNWVKQAPGQGLEWMGWINTYTGEPTYADKFQGRVTMTTDTSTSTAYMEIRNLGGDDTAVYYCARWSWSDGYYVYFDYWGQGTSVTVSSGGGGSGGGGSGGGGSDIVMTQSPDSLTVSLGERTTINCKSSQSVLDSSTNKNSLAWYQQKPGQPPKLLLSWASTRESGIPDRFSGSGSGTDFTLTIDSPQPEDSATYYCQQSAHFPITFGQGTRLEIKHHHHHH

SEQ ID NO: 3621 - protein, 644 aa, synthetic construct
  REGION 1..644: note = Description of Artificial Sequence: Synthetic polypeptide
VVGGGGEVQLVESGGGLVQPGNSLRLSCAASGFTFSKFGMSWVRQAPGKGLEWVSSISGSGRDTLYADSVKGRFTISRDNAKTTLYLQMNSLRPEDTAVYYCTIGGSLSVSSQGTLVTVSSGGGGSGGGSQVQLVQSGAEVKKPGESVKVSCKASGYTFTNYGMNWVKQAPGQGLEWMGWINTYTGEPTYADKFQGRVTMTTDTSTSTAYMEIRNLGGDDTAVYYCARWSWSDGYYVYFDYWGQGTSVTVSSGGGGSGGGGSGGGGSDIVMTQSPDSLTVSLGERTTINCKSSQSVLDSSTNKNSLAWYQQKPGQPPKLLLSWASTRESGIPDRFSGSGSGTDFTLTIDSPQPEDSATYYCQQSAHFPITFGQGTRLEIKGGGGSGGGSEVQLVESGGGLVQPGGSLKLSCAASGFTFNKYAINWVRQAPGKGLEWVARIRSKYNNYATYYADQVKDRFTISRDDSKNTAYLQMNNLKTEDTAVYYCVRHANFGNSYISYWAYWGQGTLVTVSSGGGGSGGGGSGGGGSQTVVTQEPSLTVSPGGTVTLTCASSTGAVTSGNYPNWVQQKPGQAPRGLIGGTKFLVPGTPARFSGSLLGGKAALTLSGVQPEDEAEYYCTLWYSNRWVFGGGTKLTVLHHHHHH

SEQ ID NO: 3622 - protein, 644 aa, synthetic construct
  REGION 1..644: note = Description of Artificial Sequence: Synthetic polypeptide
VVGGGGEVQLVESGGGLVQPGGSLKLSCAASGFTFNKYAINWVRQAPGKGLEWVARIRSKYNNYATYYADQVKDRFTISRDDSKNTAYLQMNNLKTEDTAVYYCVRHANFGNSYISYWAYWGQGTLVTVSSGGGGSGGGGSGGGGSQTVVTQEPSLTVSPGGTVTLTCASSTGAVTSGNYPNWVQQKPGQAPRGLIGGTKFLVPGTPARFSGSLLGGKAALTLSGVQPEDEAEYYCTLWYSNRWVFGGGTKLTVLGGGGSGGGSEVQLVESGGGLVQPGNSLRLSCAASGFTFSKFGMSWVRQAPGKGLEWVSSISGSGRDTLYADSVKGRFTISRDNAKTTLYLQMNSLRPEDTAVYYCTIGGSLSVSSQGTLVTVSSGGGGSGGGSQVQLVQSGAEVKKPGESVKVSCKASGYTFTNYGMNWVKQAPGQGLEWMGWINTYTGEPTYADKFQGRVTMTTDTSTSTAYMEIRNLGGDDTAVYYCARWSWSDGYYVYFDYWGQGTSVTVSSGGGGSGGGGSGGGGSDIVMTQSPDSLTVSLGERTTINCKSSQSVLDSSTNKNSLAWYQQKPGQPPKLLLSWASTRESGIPDRFSGSGSGTDFTLTIDSPQPEDSATYYCQQSAHFPITFGQGTRLEIKHHHHHH

SEQ ID NO: 3623 - protein, 644 aa, synthetic construct
  REGION 1..644: note = Description of Artificial Sequence: Synthetic polypeptide
VVGGGGEVQLVESGGGLVQPGGSLKLSCAASGFTFNKYAINWVRQAPGKGLEWVARIRSKYNNYATYYADQVKDRFTISRDDSKNTAYLQMNNLKTEDTAVYYCVRHANFGNSYISYWAYWGQGTLVTVSSGGGGSGGGGSGGGGSQTVVTQEPSLTVSPGGTVTLTCASSTGAVTSGNYPNWVQQKPGQAPRGLIGGTKFLVPGTPARFSGSLLGGKAALTLSGVQPEDEAEYYCTLWYSNRWVFGGGTKLTVLGGGGSGGGSQVQLVQSGAEVKKPGESVKVSCKASGYTFTNYGMNWVKQAPGQGLEWMGWINTYTGEPTYADKFQGRVTMTTDTSTSTAYMEIRNLGGDDTAVYYCARWSWSDGYYVYFDYWGQGTSVTVSSGGGGSGGGGSGGGGSDIVMTQSPDSLTVSLGERTTINCKSSQSVLDSSTNKNSLAWYQQKPGQPPKLLLSWASTRESGIPDRFSGSGSGTDFTLTIDSPQPEDSATYYCQQSAHFPITFGQGTRLEIKGGGGSGGGSEVQLVESGGGLVQPGNSLRLSCAASGFTFSKFGMSWVRQAPGKGLEWVSSISGSGRDTLYADSVKGRFTISRDNAKTTLYLQMNSLRPEDTAVYYCTIGGSLSVSSQGTLVTVSSHHHHHH

SEQ ID NO: 3624 - protein, 644 aa, synthetic construct
  REGION 1..644: note = Description of Artificial Sequence: Synthetic polypeptide
VVGGGGQVQLVQSGAEVKKPGESVKVSCKASGYTFTNYGMNWVKQAPGQGLEWMGWINTYTGEPTYADKFQGRVTMTTDTSTSTAYMEIRNLGGDDTAVYYCARWSWSDGYYVYFDYWGQGTSVTVSSGGGGSGGGGSGGGGSDIVMTQSPDSLTVSLGERTTINCKSSQSVLDSSTNKNSLAWYQQKPGQPPKLLLSWASTRESGIPDRFSGSGSGTDFTLTIDSPQPEDSATYYCQQSAHFPITFGQGTRLEIKGGGGSGGGSEVQLVESGGGLVQPGNSLRLSCAASGFTFSKFGMSWVRQAPGKGLEWVSSISGSGRDTLYADSVKGRFTISRDNAKTTLYLQMNSLRPEDTAVYYCTIGGSLSVSSQGTLVTVSSGGGGSGGGSEVQLVESGGGLVQPGGSLKLSCAASGFTFNKYAINWVRQAPGKGLEWVARIRSKYNNYATYYADQVKDRFTISRDDSKNTAYLQMNNLKTEDTAVYYCVRHANFGNSYISYWAYWGQGTLVTVSSGGGGSGGGGSGGGGSQTVVTQEPSLTVSPGGTVTLTCASSTGAVTSGNYPNWVQQKPGQAPRGLIGGTKFLVPGTPARFSGSLLGGKAALTLSGVQPEDEAEYYCTLWYSNRWVFGGGTKLTVLHHHHHH

SEQ ID NO: 3625 - protein, 644 aa, synthetic construct
  REGION 1..644: note = Description of Artificial Sequence: Synthetic polypeptide
VVGGGGQVQLVQSGAEVKKPGESVKVSCKASGYTFTNYGMNWVKQAPGQGLEWMGWINTYTGEPTYADKFQGRVTMTTDTSTSTAYMEIRNLGGDDTAVYYCARWSWSDGYYVYFDYWGQGTSVTVSSGGGGSGGGGSGGGGSDIVMTQSPDSLTVSLGERTTINCKSSQSVLDSSTNKNSLAWYQQKPGQPPKLLLSWASTRESGIPDRFSGSGSGTDFTLTIDSPQPEDSATYYCQQSAHFPITFGQGTRLEIKGGGGSGGGSEVQLVESGGGLVQPGGSLKLSCAASGFTFNKYAINWVRQAPGKGLEWVARIRSKYNNYATYYADQVKDRFTISRDDSKNTAYLQMNNLKTEDTAVYYCVRHANFGNSYISYWAYWGQGTLVTVSSGGGGSGGGGSGGGGSQTVVTQEPSLTVSPGGTVTLTCASSTGAVTSGNYPNWVQQKPGQAPRGLIGGTKFLVPGTPARFSGSLLGGKAALTLSGVQPEDEAEYYCTLWYSNRWVFGGGTKLTVLGGGGSGGGSEVQLVESGGGLVQPGNSLRLSCAASGFTFSKFGMSWVRQAPGKGLEWVSSISGSGRDTLYADSVKGRFTISRDNAKTTLYLQMNSLRPEDTAVYYCTIGGSLSVSSQGTLVTVSSHHHHHH

SEQ ID NO: 3626 - protein, 653 aa, synthetic construct
  REGION 1..653: note = Description of Artificial Sequence: Synthetic polypeptide
QDGNEEGGGGSGGGGSGGGGSGGGEVQLVESGGGLVQPGNSLRLSCAASGFTFSKFGMSWVRQAPGKGLEWVSSISGSGRDTLYADSVKGRFTISRDNAKTTLYLQMNSLRPEDTAVYYCTIGGSLSVSSQGTLVTVSSGGGGSGGGSEVQLVESGGGLVQPGGSLKLSCAASGFTFNKYAINWVRQAPGKGLEWVARIRSKYNNYATYYADQVKDRFTISRDDSKNTAYLQMNNLKTEDTAVYYCVRHANFGNSYISYWAYWGQGTLVTVSSGGGGSGGGGSGGGGSQTVVTQEPSLTVSPGGTVTLTCASSTGAVTSGNYPNWVQQKPGQAPRGLIGGTKFLVPGTPARFSGSLLGGKAALTLSGVQPEDEAEYYCTLWYSNRWVFGGGTKLTVLGGGGSGGGSENVLTQSPATLSVTPGEKATITCRASQSVSYMHWYQQKPGQAPRLLIYDASNRASGVPSRFSGSGSGTDHTLTISSLEAEDAATYYCFQGSVYPFTFGQGTKLEIKGGGGSGGGGSGGGGSQVTLRESGPALVKPTQTLTLTCTFSGFSLSTSGMGVGWIRQPPGKALEWLAHIWWDDDKRYNPALKSRLTISKDTSKNQVFLTMTNMDPVDTATYYCARMELWSYYFDYWGQGTTVTVSSHHHHHH

SEQ ID NO: 3627 - protein, 653 aa, synthetic construct
  REGION 1..653: note = Description of Artificial Sequence: Synthetic polypeptide
QDGNEEGGGGSGGGGSGGGGSGGGEVQLVESGGGLVQPGNSLRLSCAASGFTFSKFGMSWVRQAPGKGLEWVSSISGSGRDTLYADSVKGRFTISRDNAKTTLYLQMNSLRPEDTAVYYCTIGGSLSVSSQGTLVTVSSGGGGSGGGSENVLTQSPATLSVTPGEKATITCRASQSVSYMHWYQQKPGQAPRLLIYDASNRASGVPSRFSGSGSGTDHTLTISSLEAEDAATYYCFQGSVYPFTFGQGTKLEIKGGGGSGGGGSGGGGSQVTLRESGPALVKPTQTLTLTCTFSGFSLSTSGMGVGWIRQPPGKALEWLAHIWWDDDKRYNPALKSRLTISKDTSKNQVFLTMTNMDPVDTATYYCARMELWSYYFDYWGQGTTVTVSSGGGGSGGGSEVQLVESGGGLVQPGGSLKLSCAASGFTFNKYAINWVRQAPGKGLEWVARIRSKYNNYATYYADQVKDRFTISRDDSKNTAYLQMNNLKTEDTAVYYCVRHANFGNSYISYWAYWGQGTLVTVSSGGGGSGGGGSGGGGSQTVVTQEPSLTVSPGGTVTLTCASSTGAVTSGNYPNWVQQKPGQAPRGLIGGTKFLVPGTPARFSGSLLGGKAALTLSGVQPEDEAEYYCTLWYSNRWVFGGGTKLTVLHHHHHH

SEQ ID NO: 3628 - protein, 653 aa, synthetic construct
  REGION 1..653: note = Description of Artificial Sequence: Synthetic polypeptide
QDGNEEGGGGSGGGGSGGGGSGGGEVQLVESGGGLVQPGGSLKLSCAASGFTFNKYAINWVRQAPGKGLEWVARIRSKYNNYATYYADQVKDRFTISRDDSKNTAYLQMNNLKTEDTAVYYCVRHANFGNSYISYWAYWGQGTLVTVSSGGGGSGGGGSGGGGSQTVVTQEPSLTVSPGGTVTLTCASSTGAVTSGNYPNWVQQKPGQAPRGLIGGTKFLVPGTPARFSGSLLGGKAALTLSGVQPEDEAEYYCTLWYSNRWVFGGGTKLTVLGGGGSGGGSEVQLVESGGGLVQPGNSLRLSCAASGFTFSKFGMSWVRQAPGKGLEWVSSISGSGRDTLYADSVKGRFTISRDNAKTTLYLQMNSLRPEDTAVYYCTIGGSLSVSSQGTLVTVSSGGGGSGGGSENVLTQSPATLSVTPGEKATITCRASQSVSYMHWYQQKPGQAPRLLIYDASNRASGVPSRFSGSGSGTDHTLTISSLEAEDAATYYCFQGSVYPFTFGQGTKLEIKGGGGSGGGGSGGGGSQVTLRESGPALVKPTQTLTLTCTFSGFSLSTSGMGVGWIRQPPGKALEWLAHIWWDDDKRYNPALKSRLTISKDTSKNQVFLTMTNMDPVDTATYYCARMELWSYYFDYWGQGTTVTVSSHHHHHH

SEQ ID NO: 3629 - protein, 653 aa, synthetic construct
  REGION 1..653: note = Description of Artificial Sequence: Synthetic polypeptide
QDGNEEGGGGSGGGGSGGGGSGGGEVQLVESGGGLVQPGGSLKLSCAASGFTFNKYAINWVRQAPGKGLEWVARIRSKYNNYATYYADQVKDRFTISRDDSKNTAYLQMNNLKTEDTAVYYCVRHANFGNSYISYWAYWGQGTLVTVSSGGGGSGGGGSGGGGSQTVVTQEPSLTVSPGGTVTLTCASSTGAVTSGNYPNWVQQKPGQAPRGLIGGTKFLVPGTPARFSGSLLGGKAALTLSGVQPEDEAEYYCTLWYSNRWVFGGGTKLTVLGGGGSGGGSENVLTQSPATLSVTPGEKATITCRASQSVSYMHWYQQKPGQAPRLLIYDASNRASGVPSRFSGSGSGTDHTLTISSLEAEDAATYYCFQGSVYPFTFGQGTKLEIKGGGGSGGGGSGGGGSQVTLRESGPALVKPTQTLTLTCTFSGFSLSTSGMGVGWIRQPPGKALEWLAHIWWDDDKRYNPALKSRLTISKDTSKNQVFLTMTNMDPVDTATYYCARMELWSYYFDYWGQGTTVTVSSGGGGSGGGSEVQLVESGGGLVQPGNSLRLSCAASGFTFSKFGMSWVRQAPGKGLEWVSSISGSGRDTLYADSVKGRFTISRDNAKTTLYLQMNSLRPEDTAVYYCTIGGSLSVSSQGTLVTVSSHHHHHH

SEQ ID NO: 3630 - protein, 653 aa, synthetic construct
  REGION 1..653: note = Description of Artificial Sequence: Synthetic polypeptide
QDGNEEGGGGSGGGGSGGGGSGGGENVLTQSPATLSVTPGEKATITCRASQSVSYMHWYQQKPGQAPRLLIYDASNRASGVPSRFSGSGSGTDHTLTISSLEAEDAATYYCFQGSVYPFTFGQGTKLEIKGGGGSGGGGSGGGGSQVTLRESGPALVKPTQTLTLTCTFSGFSLSTSGMGVGWIRQPPGKALEWLAHIWWDDDKRYNPALKSRLTISKDTSKNQVFLTMTNMDPVDTATYYCARMELWSYYFDYWGQGTTVTVSSGGGGSGGGSEVQLVESGGGLVQPGNSLRLSCAASGFTFSKFGMSWVRQAPGKGLEWVSSISGSGRDTLYADSVKGRFTISRDNAKTTLYLQMNSLRPEDTAVYYCTIGGSLSVSSQGTLVTVSSGGGGSGGGSEVQLVESGGGLVQPGGSLKLSCAASGFTFNKYAINWVRQAPGKGLEWVARIRSKYNNYATYYADQVKDRFTISRDDSKNTAYLQMNNLKTEDTAVYYCVRHANFGNSYISYWAYWGQGTLVTVSSGGGGSGGGGSGGGGSQTVVTQEPSLTVSPGGTVTLTCASSTGAVTSGNYPNWVQQKPGQAPRGLIGGTKFLVPGTPARFSGSLLGGKAALTLSGVQPEDEAEYYCTLWYSNRWVFGGGTKLTVLHHHHHH

SEQ ID NO: 3631 - protein, 653 aa, synthetic construct
  REGION 1..653: note = Description of Artificial Sequence: Synthetic polypeptide
QDGNEEGGGGSGGGGSGGGGSGGGENVLTQSPATLSVTPGEKATITCRASQSVSYMHWYQQKPGQAPRLLIYDASNRASGVPSRFSGSGSGTDHTLTISSLEAEDAATYYCFQGSVYPFTFGQGTKLEIKGGGGSGGGGSGGGGSQVTLRESGPALVKPTQTLTLTCTFSGFSLSTSGMGVGWIRQPPGKALEWLAHIWWDDDKRYNPALKSRLTISKDTSKNQVFLTMTNMDPVDTATYYCARMELWSYYFDYWGQGTTVTVSSGGGGSGGGSEVQLVESGGGLVQPGGSLKLSCAASGFTFNKYAINWVRQAPGKGLEWVARIRSKYNNYATYYADQVKDRFTISRDDSKNTAYLQMNNLKTEDTAVYYCVRHANFGNSYISYWAYWGQGTLVTVSSGGGGSGGGGSGGGGSQTVVTQEPSLTVSPGGTVTLTCASSTGAVTSGNYPNWVQQKPGQAPRGLIGGTKFLVPGTPARFSGSLLGGKAALTLSGVQPEDEAEYYCTLWYSNRWVFGGGTKLTVLGGGGSGGGSEVQLVESGGGLVQPGNSLRLSCAASGFTFSKFGMSWVRQAPGKGLEWVSSISGSGRDTLYADSVKGRFTISRDNAKTTLYLQMNSLRPEDTAVYYCTIGGSLSVSSQGTLVTVSSHHHHHH

SEQ ID NO: 3632 - protein, 635 aa, synthetic construct
  REGION 1..635: note = Description of Artificial Sequence: Synthetic polypeptide
VVGGGGEVQLVESGGGLVQPGNSLRLSCAASGFTFSKFGMSWVRQAPGKGLEWVSSISGSGRDTLYADSVKGRFTISRDNAKTTLYLQMNSLRPEDTAVYYCTIGGSLSVSSQGTLVTVSSGGGGSGGGSEVQLVESGGGLVQPGGSLKLSCAASGFTFNKYAINWVRQAPGKGLEWVARIRSKYNNYATYYADQVKDRFTISRDDSKNTAYLQMNNLKTEDTAVYYCVRHANFGNSYISYWAYWGQGTLVTVSSGGGGSGGGGSGGGGSQTVVTQEPSLTVSPGGTVTLTCASSTGAVTSGNYPNWVQQKPGQAPRGLIGGTKFLVPGTPARFSGSLLGGKAALTLSGVQPEDEAEYYCTLWYSNRWVFGGGTKLTVLGGGGSGGGSENVLTQSPATLSVTPGEKATITCRASQSVSYMHWYQQKPGQAPRLLIYDASNRASGVPSRFSGSGSGTDHTLTISSLEAEDAATYYCFQGSVYPFTFGQGTKLEIKGGGGSGGGGSGGGGSQVTLRESGPALVKPTQTLTLTCTFSGFSLSTSGMGVGWIRQPPGKALEWLAHIWWDDDKRYNPALKSRLTISKDTSKNQVFLTMTNMDPVDTATYYCARMELWSYYFDYWGQGTTVTVSSHHHHHH

SEQ ID NO: 3633 - protein, 635 aa, synthetic construct
  REGION 1..635: note = Description of Artificial Sequence: Synthetic polypeptide
VVGGGGEVQLVESGGGLVQPGNSLRLSCAASGFTFSKFGMSWVRQAPGKGLEWVSSISGSGRDTLYADSVKGRFTISRDNAKTTLYLQMNSLRPEDTAVYYCTIGGSLSVSSQGTLVTVSSGGGGSGGGSENVLTQSPATLSVTPGEKATITCRASQSVSYMHWYQQKPGQAPRLLIYDASNRASGVPSRFSGSGSGTDHTLTISSLEAEDAATYYCFQGSVYPFTFGQGTKLEIKGGGGSGGGGSGGGGSQVTLRESGPALVKPTQTLTLTCTFSGFSLSTSGMGVGWIRQPPGKALEWLAHIWWDDDKRYNPALKSRLTISKDTSKNQVFLTMTNMDPVDTATYYCARMELWSYYFDYWGQGTTVTVSSGGGGSGGGSEVQLVESGGGLVQPGGSLKLSCAASGFTFNKYAINWVRQAPGKGLEWVARIRSKYNNYATYYADQVKDRFTISRDDSKNTAYLQMNNLKTEDTAVYYCVRHANFGNSYISYWAYWGQGTLVTVSSGGGGSGGGGSGGGGSQTVVTQEPSLTVSPGGTVTLTCASSTGAVTSGNYPNWVQQKPGQAPRGLIGGTKFLVPGTPARFSGSLLGGKAALTLSGVQPEDEAEYYCTLWYSNRWVFGGGTKLTVLHHHHHH

SEQ ID NO: 3634 - protein, 635 aa, synthetic construct
  REGION 1..635: note = Description of Artificial Sequence: Synthetic polypeptide
VVGGGGEVQLVESGGGLVQPGGSLKLSCAASGFTFNKYAINWVRQAPGKGLEWVARIRSKYNNYATYYADQVKDRFTISRDDSKNTAYLQMNNLKTEDTAVYYCVRHANFGNSYISYWAYWGQGTLVTVSSGGGGSGGGGSGGGGSQTVVTQEPSLTVSPGGTVTLTCASSTGAVTSGNYPNWVQQKPGQAPRGLIGGTKFLVPGTPARFSGSLLGGKAALTLSGVQPEDEAEYYCTLWYSNRWVFGGGTKLTVLGGGGSGGGSEVQLVESGGGLVQPGNSLRLSCAASGFTFSKFGMSWVRQAPGKGLEWVSSISGSGRDTLYADSVKGRFTISRDNAKTTLYLQMNSLRPEDTAVYYCTIGGSLSVSSQGTLVTVSSGGGGSGGGSENVLTQSPATLSVTPGEKATITCRASQSVSYMHWYQQKPGQAPRLLIYDASNRASGVPSRFSGSGSGTDHTLTISSLEAEDAATYYCFQGSVYPFTFGQGTKLEIKGGGGSGGGGSGGGGSQVTLRESGPALVKPTQTLTLTCTFSGFSLSTSGMGVGWIRQPPGKALEWLAHIWWDDDKRYNPALKSRLTISKDTSKNQVFLTMTNMDPVDTATYYCARMELWSYYFDYWGQGTTVTVSSHHHHHH

SEQ ID NO: 3635 - protein, 635 aa, synthetic construct
  REGION 1..635: note = Description of Artificial Sequence: Synthetic polypeptide
VVGGGGEVQLVESGGGLVQPGGSLKLSCAASGFTFNKYAINWVRQAPGKGLEWVARIRSKYNNYATYYADQVKDRFTISRDDSKNTAYLQMNNLKTEDTAVYYCVRHANFGNSYISYWAYWGQGTLVTVSSGGGGSGGGGSGGGGSQTVVTQEPSLTVSPGGTVTLTCASSTGAVTSGNYPNWVQQKPGQAPRGLIGGTKFLVPGTPARFSGSLLGGKAALTLSGVQPEDEAEYYCTLWYSNRWVFGGGTKLTVLGGGGSGGGSENVLTQSPATLSVTPGEKATITCRASQSVSYMHWYQQKPGQAPRLLIYDASNRASGVPSRFSGSGSGTDHTLTISSLEAEDAATYYCFQGSVYPFTFGQGTKLEIKGGGGSGGGGSGGGGSQVTLRESGPALVKPTQTLTLTCTFSGFSLSTSGMGVGWIRQPPGKALEWLAHIWWDDDKRYNPALKSRLTISKDTSKNQVFLTMTNMDPVDTATYYCARMELWSYYFDYWGQGTTVTVSSGGGGSGGGSEVQLVESGGGLVQPGNSLRLSCAASGFTFSKFGMSWVRQAPGKGLEWVSSISGSGRDTLYADSVKGRFTISRDNAKTTLYLQMNSLRPEDTAVYYCTIGGSLSVSSQGTLVTVSSHHHHHH

SEQ ID NO: 3636 - protein, 635 aa, synthetic construct
  REGION 1..635: note = Description of Artificial Sequence: Synthetic polypeptide
VVGGGGENVLTQSPATLSVTPGEKATITCRASQSVSYMHWYQQKPGQAPRLLIYDASNRASGVPSRFSGSGSGTDHTLTISSLEAEDAATYYCFQGSVYPFTFGQGTKLEIKGGGGSGGGGSGGGGSQVTLRESGPALVKPTQTLTLTCTFSGFSLSTSGMGVGWIRQPPGKALEWLAHIWWDDDKRYNPALKSRLTISKDTSKNQVFLTMTNMDPVDTATYYCARMELWSYYFDYWGQGTTVTVSSGGGGSGGGSEVQLVESGGGLVQPGGSLKLSCAASGFTFNKYAINWVRQAPGKGLEWVARIRSKYNNYATYYADQVKDRFTISRDDSKNTAYLQMNNLKTEDTAVYYCVRHANFGNSYISYWAYWGQGTLVTVSSGGGGSGGGGSGGGGSQTVVTQEPSLTVSPGGTVTLTCASSTGAVTSGNYPNWVQQKPGQAPRGLIGGTKFLVPGTPARFSGSLLGGKAALTLSGVQPEDEAEYYCTLWYSNRWVFGGGTKLTVLGGGGSGGGSEVQLVESGGGLVQPGNSLRLSCAASGFTFSKFGMSWVRQAPGKGLEWVSSISGSGRDTLYADSVKGRFTISRDNAKTTLYLQMNSLRPEDTAVYYCTIGGSLSVSSQGTLVTVSSHHHHHH

SEQ ID NO: 3637 - protein, 537 aa, synthetic construct
  REGION 1..537: note = Description of Artificial Sequence: Synthetic polypeptide
QDGNEEGGGGSGGGGSGGGGSGGGEVQLVESGGGLVQPGNSLRLSCAASGFTFSKFGMSWVRQAPGKGLEWVSSISGSGRDTLYADSVKGRFTISRDNAKTTLYLQMNSLRPEDTAVYYCTIGGSLSVSSQGTLVTVSSGGGGSGGGSEVQLVESGGGLVQPGGSLKLSCAASGFTFNKYAINWVRQAPGKGLEWVARIRSKYNNYATYYADQVKDRFTISRDDSKNTAYLQMNNLKTEDTAVYYCVRHANFGNSYISYWAYWGQGTLVTVSSGGGGSGGGGSGGGGSQTVVTQEPSLTVSPGGTVTLTCASSTGAVTSGNYPNWVQQKPGQAPRGLIGGTKFLVPGTPARFSGSLLGGKAALTLSGVQPEDEAEYYCTLWYSNRWVFGGGTKLTVLGGGGSGGGSEVQLLESGGGLVQPGGSLTLSCAASGRTFSSYAMGWFRQAPGKEREFVAAISWSGSNTYYADSVKGRFTISRDNSKNTLYLQMNSLRAEDTAVYYCAAGGSTRVVVTTTPVVKYWGQGTLVTVSSHHHHHH

SEQ ID NO: 3638 - protein, 537 aa, synthetic construct
  REGION 1..537: note = Description of Artificial Sequence: Synthetic polypeptide
QDGNEEGGGGSGGGGSGGGGSGGGEVQLVESGGGLVQPGNSLRLSCAASGFTFSKFGMSWVRQAPGKGLEWVSSISGSGRDTLYADSVKGRFTISRDNAKTTLYLQMNSLRPEDTAVYYCTIGGSLSVSSQGTLVTVSSGGGGSGGGSEVQLLESGGGLVQPGGSLTLSCAASGRTFSSYAMGWFRQAPGKEREFVAAISWSGSNTYYADSVKGRFTISRDNSKNTLYLQMNSLRAEDTAVYYCAAGGSTRVVVTTTPVVKYWGQGTLVTVSSGGGGSGGGSEVQLVESGGGLVQPGGSLKLSCAASGFTFNKYAINWVRQAPGKGLEWVARIRSKYNNYATYYADQVKDRFTISRDDSKNTAYLQMNNLKTEDTAVYYCVRHANFGNSYISYWAYWGQGTLVTVSSGGGGSGGGGSGGGGSQTVVTQEPSLTVSPGGTVTLTCASSTGAVTSGNYPNWVQQKPGQAPRGLIGGTKFLVPGTPARFSGSLLGGKAALTLSGVQPEDEAEYYCTLWYSNRWVFGGGTKLTVLHHHHHH

SEQ ID NO: 3639 - protein, 537 aa, synthetic construct
  REGION 1..537: note = Description of Artificial Sequence: Synthetic polypeptide
QDGNEEGGGGSGGGGSGGGGSGGGEVQLVESGGGLVQPGGSLKLSCAASGFTFNKYAINWVRQAPGKGLEWVARIRSKYNNYATYYADQVKDRFTISRDDSKNTAYLQMNNLKTEDTAVYYCVRHANFGNSYISYWAYWGQGTLVTVSSGGGGSGGGGSGGGGSQTVVTQEPSLTVSPGGTVTLTCASSTGAVTSGNYPNWVQQKPGQAPRGLIGGTKFLVPGTPARFSGSLLGGKAALTLSGVQPEDEAEYYCTLWYSNRWVFGGGTKLTVLGGGGSGGGSEVQLVESGGGLVQPGNSLRLSCAASGFTFSKFGMSWVRQAPGKGLEWVSSISGSGRDTLYADSVKGRFTISRDNAKTTLYLQMNSLRPEDTAVYYCTIGGSLSVSSQGTLVTVSSGGGGSGGGSEVQLLESGGGLVQPGGSLTLSCAASGRTFSSYAMGWFRQAPGKEREFVAAISWSGSNTYYADSVKGRFTISRDNSKNTLYLQMNSLRAEDTAVYYCAAGGSTRVVVTTTPVVKYWGQGTLVTVSSHHHHHH

SEQ ID NO: 3640 - protein, 537 aa, synthetic construct
  REGION 1..537: note = Description of Artificial Sequence: Synthetic polypeptide
QDGNEEGGGGSGGGGSGGGGSGGGEVQLVESGGGLVQPGGSLKLSCAASGFTFNKYAINWVRQAPGKGLEWVARIRSKYNNYATYYADQVKDRFTISRDDSKNTAYLQMNNLKTEDTAVYYCVRHANFGNSYISYWAYWGQGTLVTVSSGGGGSGGGGSGGGGSQTVVTQEPSLTVSPGGTVTLTCASSTGAVTSGNYPNWVQQKPGQAPRGLIGGTKFLVPGTPARFSGSLLGGKAALTLSGVQPEDEAEYYCTLWYSNRWVFGGGTKLTVLGGGGSGGGSEVQLLESGGGLVQPGGSLTLSCAASGRTFSSYAMGWFRQAPGKEREFVAAISWSGSNTYYADSVKGRFTISRDNSKNTLYLQMNSLRAEDTAVYYCAAGGSTRVVVTTTPVVKYWGQGTLVTVSSGGGGSGGGSEVQLVESGGGLVQPGNSLRLSCAASGFTFSKFGMSWVRQAPGKGLEWVSSISGSGRDTLYADSVKGRFTISRDNAKTTLYLQMNSLRPEDTAVYYCTIGGSLSVSSQGTLVTVSSHHHHHH

SEQ ID NO: 3641 - protein, 537 aa, synthetic construct
  REGION 1..537: note = Description of Artificial Sequence: Synthetic polypeptide
QDGNEEGGGGSGGGGSGGGGSGGGEVQLLESGGGLVQPGGSLTLSCAASGRTFSSYAMGWFRQAPGKEREFVAAISWSGSNTYYADSVKGRFTISRDNSKNTLYLQMNSLRAEDTAVYYCAAGGSTRVVVTTTPVVKYWGQGTLVTVSSGGGGSGGGSEVQLVESGGGLVQPGNSLRLSCAASGFTFSKFGMSWVRQAPGKGLEWVSSISGSGRDTLYADSVKGRFTISRDNAKTTLYLQMNSLRPEDTAVYYCTIGGSLSVSSQGTLVTVSSGGGGSGGGSEVQLVESGGGLVQPGGSLKLSCAASGFTFNKYAINWVRQAPGKGLEWVARIRSKYNNYATYYADQVKDRFTISRDDSKNTAYLQMNNLKTEDTAVYYCVRHANFGNSYISYWAYWGQGTLVTVSSGGGGSGGGGSGGGGSQTVVTQEPSLTVSPGGTVTLTCASSTGAVTSGNYPNWVQQKPGQAPRGLIGGTKFLVPGTPARFSGSLLGGKAALTLSGVQPEDEAEYYCTLWYSNRWVFGGGTKLTVLHHHHHH

SEQ ID NO: 3642 - protein, 537 aa, synthetic construct
  REGION 1..537: note = Description of Artificial Sequence: Synthetic polypeptide
QDGNEEGGGGSGGGGSGGGGSGGGEVQLLESGGGLVQPGGSLTLSCAASGRTFSSYAMGWFRQAPGKEREFVAAISWSGSNTYYADSVKGRFTISRDNSKNTLYLQMNSLRAEDTAVYYCAAGGSTRVVVTTTPVVKYWGQGTLVTVSSGGGGSGGGSEVQLVESGGGLVQPGGSLKLSCAASGFTFNKYAINWVRQAPGKGLEWVARIRSKYNNYATYYADQVKDRFTISRDDSKNTAYLQMNNLKTEDTAVYYCVRHANFGNSYISYWAYWGQGTLVTVSSGGGGSGGGGSGGGGSQTVVTQEPSLTVSPGGTVTLTCASSTGAVTSGNYPNWVQQKPGQAPRGLIGGTKFLVPGTPARFSGSLLGGKAALTLSGVQPEDEAEYYCTLWYSNRWVFGGGTKLTVLGGGGSGGGSEVQLVESGGGLVQPGNSLRLSCAASGFTFSKFGMSWVRQAPGKGLEWVSSISGSGRDTLYADSVKGRFTISRDNAKTTLYLQMNSLRPEDTAVYYCTIGGSLSVSSQGTLVTVSSHHHHHH

SEQ ID NO: 3643 - protein, 519 aa, synthetic construct
  REGION 1..519: note = Description of Artificial Sequence: Synthetic polypeptide
VVGGGGEVQLVESGGGLVQPGNSLRLSCAASGFTFSKFGMSWVRQAPGKGLEWVSSISGSGRDTLYADSVKGRFTISRDNAKTTLYLQMNSLRPEDTAVYYCTIGGSLSVSSQGTLVTVSSGGGGSGGGSEVQLVESGGGLVQPGGSLKLSCAASGFTFNKYAINWVRQAPGKGLEWVARIRSKYNNYATYYADQVKDRFTISRDDSKNTAYLQMNNLKTEDTAVYYCVRHANFGNSYISYWAYWGQGTLVTVSSGGGGSGGGGSGGGGSQTVVTQEPSLTVSPGGTVTLTCASSTGAVTSGNYPNWVQQKPGQAPRGLIGGTKFLVPGTPARFSGSLLGGKAALTLSGVQPEDEAEYYCTLWYSNRWVFGGGTKLTVLGGGGSGGGSEVQLLESGGGLVQPGGSLTLSCAASGRTFSSYAMGWFRQAPGKEREFVAAISWSGSNTYYADSVKGRFTISRDNSKNTLYLQMNSLRAEDTAVYYCAAGGSTRVVVTTTPVVKYWGQGTLVTVSSHHHHHH

SEQ ID NO: 3644 - protein, 519 aa, synthetic construct
  REGION 1..519: note = Description of Artificial Sequence: Synthetic polypeptide
VVGGGGEVQLVESGGGLVQPGNSLRLSCAASGFTFSKFGMSWVRQAPGKGLEWVSSISGSGRDTLYADSVKGRFTISRDNAKTTLYLQMNSLRPEDTAVYYCTIGGSLSVSSQGTLVTVSSGGGGSGGGSEVQLLESGGGLVQPGGSLTLSCAASGRTFSSYAMGWFRQAPGKEREFVAAISWSGSNTYYADSVKGRFTISRDNSKNTLYLQMNSLRAEDTAVYYCAAGGSTRVVVTTTPVVKYWGQGTLVTVSSGGGGSGGGSEVQLVESGGGLVQPGGSLKLSCAASGFTFNKYAINWVRQAPGKGLEWVARIRSKYNNYATYYADQVKDRFTISRDDSKNTAYLQMNNLKTEDTAVYYCVRHANFGNSYISYWAYWGQGTLVTVSSGGGGSGGGGSGGGGSQTVVTQEPSLTVSPGGTVTLTCASSTGAVTSGNYPNWVQQKPGQAPRGLIGGTKFLVPGTPARFSGSLLGGKAALTLSGVQPEDEAEYYCTLWYSNRWVFGGGTKLTVLHHHHHH

SEQ ID NO: 3645 - protein, 519 aa, synthetic construct
  REGION 1..519: note = Description of Artificial Sequence: Synthetic polypeptide
VVGGGGEVQLVESGGGLVQPGGSLKLSCAASGFTFNKYAINWVRQAPGKGLEWVARIRSKYNNYATYYADQVKDRFTISRDDSKNTAYLQMNNLKTEDTAVYYCVRHANFGNSYISYWAYWGQGTLVTVSSGGGGSGGGGSGGGGSQTVVTQEPSLTVSPGGTVTLTCASSTGAVTSGNYPNWVQQKPGQAPRGLIGGTKFLVPGTPARFSGSLLGGKAALTLSGVQPEDEAEYYCTLWYSNRWVFGGGTKLTVLGGGGSGGGSEVQLVESGGGLVQPGNSLRLSCAASGFTFSKFGMSWVRQAPGKGLEWVSSISGSGRDTLYADSVKGRFTISRDNAKTTLYLQMNSLRPEDTAVYYCTIGGSLSVSSQGTLVTVSSGGGGSGGGSEVQLLESGGGLVQPGGSLTLSCAASGRTFSSYAMGWFRQAPGKEREFVAAISWSGSNTYYADSVKGRFTISRDNSKNTLYLQMNSLRAEDTAVYYCAAGGSTRVVVTTTPVVKYWGQGTLVTVSSHHHHHH

SEQ ID NO: 3646 - protein, 519 aa, synthetic construct
  REGION 1..519: note = Description of Artificial Sequence: Synthetic polypeptide
VVGGGGEVQLVESGGGLVQPGGSLKLSCAASGFTFNKYAINWVRQAPGKGLEWVARIRSKYNNYATYYADQVKDRFTISRDDSKNTAYLQMNNLKTEDTAVYYCVRHANFGNSYISYWAYWGQGTLVTVSSGGGGSGGGGSGGGGSQTVVTQEPSLTVSPGGTVTLTCASSTGAVTSGNYPNWVQQKPGQAPRGLIGGTKFLVPGTPARFSGSLLGGKAALTLSGVQPEDEAEYYCTLWYSNRWVFGGGTKLTVLGGGGSGGGSEVQLLESGGGLVQPGGSLTLSCAASGRTFSSYAMGWFRQAPGKEREFVAAISWSGSNTYYADSVKGRFTISRDNSKNTLYLQMNSLRAEDTAVYYCAAGGSTRVVVTTTPVVKYWGQGTLVTVSSGGGGSGGGSEVQLVESGGGLVQPGNSLRLSCAASGFTFSKFGMSWVRQAPGKGLEWVSSISGSGRDTLYADSVKGRFTISRDNAKTTLYLQMNSLRPEDTAVYYCTIGGSLSVSSQGTLVTVSSHHHHHH

SEQ ID NO: 3647 - protein, 519 aa, synthetic construct
  REGION 1..519: note = Description of Artificial Sequence: Synthetic polypeptide
VVGGGGEVQLLESGGGLVQPGGSLTLSCAASGRTFSSYAMGWFRQAPGKEREFVAAISWSGSNTYYADSVKGRFTISRDNSKNTLYLQMNSLRAEDTAVYYCAAGGSTRVVVTTTPVVKYWGQGTLVTVSSGGGGSGGGSEVQLVESGGGLVQPGGSLKLSCAASGFTFNKYAINWVRQAPGKGLEWVARIRSKYNNYATYYADQVKDRFTISRDDSKNTAYLQMNNLKTEDTAVYYCVRHANFGNSYISYWAYWGQGTLVTVSSGGGGSGGGGSGGGGSQTVVTQEPSLTVSPGGTVTLTCASSTGAVTSGNYPNWVQQKPGQAPRGLIGGTKFLVPGTPARFSGSLLGGKAALTLSGVQPEDEAEYYCTLWYSNRWVFGGGTKLTVLGGGGSGGGSEVQLVESGGGLVQPGNSLRLSCAASGFTFSKFGMSWVRQAPGKGLEWVSSISGSGRDTLYADSVKGRFTISRDNAKTTLYLQMNSLRPEDTAVYYCTIGGSLSVSSQGTLVTVSSHHHHHH

SEQ ID NO: 3648 - protein, 523 aa, synthetic construct
  REGION 1..523: note = Description of Artificial Sequence: Synthetic polypeptide
QDGNEEGGGGSGGGGSGGGGSGGGEVQLVESGGGLVQPGNSLRLSCAASGFTFSKFGMSWVRQAPGKGLEWVSSISGSGRDTLYADSVKGRFTISRDNAKTTLYLQMNSLRPEDTAVYYCTIGGSLSVSSQGTLVTVSSGGGGSGGGSEVQLVESGGGLVQPGGSLKLSCAASGFTFNKYAINWVRQAPGKGLEWVARIRSKYNNYATYYADQVKDRFTISRDDSKNTAYLQMNNLKTEDTAVYYCVRHANFGNSYISYWAYWGQGTLVTVSSGGGGSGGGGSGGGGSQTVVTQEPSLTVSPGGTVTLTCASSTGAVTSGNYPNWVQQKPGQAPRGLIGGTKFLVPGTPARFSGSLLGGKAALTLSGVQPEDEAEYYCTLWYSNRWVFGGGTKLTVLGGGGSGGGSEVQLVESGGGLVQPGGSLTLSCAASGSTFSINHFSWYRQAPGKQRELVAFISSDGVSIDVESVKGRFTISGDNSKNTAYLQMNSLRAEDTAVYYCYYRGFWGQGTLVTVSSHHHHHH

SEQ ID NO: 3649 - protein, 523 aa, synthetic construct
  REGION 1..523: note = Description of Artificial Sequence: Synthetic polypeptide
QDGNEEGGGGSGGGGSGGGGSGGGEVQLVESGGGLVQPGNSLRLSCAASGFTFSKFGMSWVRQAPGKGLEWVSSISGSGRDTLYADSVKGRFTISRDNAKTTLYLQMNSLRPEDTAVYYCTIGGSLSVSSQGTLVTVSSGGGGSGGGSEVQLVESGGGLVQPGGSLTLSCAASGSTFSINHFSWYRQAPGKQRELVAFISSDGVSIDVESVKGRFTISGDNSKNTAYLQMNSLRAEDTAVYYCYYRGFWGQGTLVTVSSGGGGSGGGSEVQLVESGGGLVQPGGSLKLSCAASGFTFNKYAINWVRQAPGKGLEWVARIRSKYNNYATYYADQVKDRFTISRDDSKNTAYLQMNNLKTEDTAVYYCVRHANFGNSYISYWAYWGQGTLVTVSSGGGGSGGGGSGGGGSQTVVTQEPSLTVSPGGTVTLTCASSTGAVTSGNYPNWVQQKPGQAPRGLIGGTKFLVPGTPARFSGSLLGGKAALTLSGVQPEDEAEYYCTLWYSNRWVFGGGTKLTVLHHHHHH

SEQ ID NO: 3650 - protein, 523 aa, synthetic construct
  REGION 1..523: note = Description of Artificial Sequence: Synthetic polypeptide
QDGNEEGGGGSGGGGSGGGGSGGGEVQLVESGGGLVQPGGSLKLSCAASGFTFNKYAINWVRQAPGKGLEWVARIRSKYNNYATYYADQVKDRFTISRDDSKNTAYLQMNNLKTEDTAVYYCVRHANFGNSYISYWAYWGQGTLVTVSSGGGGSGGGGSGGGGSQTVVTQEPSLTVSPGGTVTLTCASSTGAVTSGNYPNWVQQKPGQAPRGLIGGTKFLVPGTPARFSGSLLGGKAALTLSGVQPEDEAEYYCTLWYSNRWVFGGGTKLTVLGGGGSGGGSEVQLVESGGGLVQPGNSLRLSCAASGFTFSKFGMSWVRQAPGKGLEWVSSISGSGRDTLYADSVKGRFTISRDNAKTTLYLQMNSLRPEDTAVYYCTIGGSLSVSSQGTLVTVSSGGGGSGGGSEVQLVESGGGLVQPGGSLTLSCAASGSTFSINHFSWYRQAPGKQRELVAFISSDGVSIDVESVKGRFTISGDNSKNTAYLQMNSLRAEDTAVYYCYYRGFWGQGTLVTVSSHHHHHH

SEQ ID NO: 3651 - protein, 523 aa, synthetic construct
  REGION 1..523: note = Description of Artificial Sequence: Synthetic polypeptide
QDGNEEGGGGSGGGGSGGGGSGGGEVQLVESGGGLVQPGGSLKLSCAASGFTFNKYAINWVRQAPGKGLEWVARIRSKYNNYATYYADQVKDRFTISRDDSKNTAYLQMNNLKTEDTAVYYCVRHANFGNSYISYWAYWGQGTLVTVSSGGGGSGGGGSGGGGSQTVVTQEPSLTVSPGGTVTLTCASSTGAVTSGNYPNWVQQKPGQAPRGLIGGTKFLVPGTPARFSGSLLGGKAALTLSGVQPEDEAEYYCTLWYSNRWVFGGGTKLTVLGGGGSGGGSEVQLVESGGGLVQPGGSLTLSCAASGSTFSINHFSWYRQAPGKQRELVAFISSDGVSIDVESVKGRFTISGDNSKNTAYLQMNSLRAEDTAVYYCYYRGFWGQGTLVTVSSGGGGSGGGSEVQLVESGGGLVQPGNSLRLSCAASGFTFSKFGMSWVRQAPGKGLEWVSSISGSGRDTLYADSVKGRFTISRDNAKTTLYLQMNSLRPEDTAVYYCTIGGSLSVSSQGTLVTVSSHHHHHH

SEQ ID NO: 3652 - protein, 523 aa, synthetic construct
  REGION 1..523: note = Description of Artificial Sequence: Synthetic polypeptide
QDGNEEGGGGSGGGGSGGGGSGGGEVQLVESGGGLVQPGGSLTLSCAASGSTFSINHFSWYRQAPGKQRELVAFISSDGVSIDVESVKGRFTISGDNSKNTAYLQMNSLRAEDTAVYYCYYRGFWGQGTLVTVSSGGGGSGGGSEVQLVESGGGLVQPGNSLRLSCAASGFTFSKFGMSWVRQAPGKGLEWVSSISGSGRDTLYADSVKGRFTISRDNAKTTLYLQMNSLRPEDTAVYYCTIGGSLSVSSQGTLVTVSSGGGGSGGGSEVQLVESGGGLVQPGGSLKLSCAASGFTFNKYAINWVRQAPGKGLEWVARIRSKYNNYATYYADQVKDRFTISRDDSKNTAYLQMNNLKTEDTAVYYCVRHANFGNSYISYWAYWGQGTLVTVSSGGGGSGGGGSGGGGSQTVVTQEPSLTVSPGGTVTLTCASSTGAVTSGNYPNWVQQKPGQAPRGLIGGTKFLVPGTPARFSGSLLGGKAALTLSGVQPEDEAEYYCTLWYSNRWVFGGGTKLTVLHHHHHH

SEQ ID NO: 3653 - protein, 523 aa, synthetic construct
  REGION 1..523: note = Description of Artificial Sequence: Synthetic polypeptide
QDGNEEGGGGSGGGGSGGGGSGGGEVQLVESGGGLVQPGGSLTLSCAASGSTFSINHFSWYRQAPGKQRELVAFISSDGVSIDVESVKGRFTISGDNSKNTAYLQMNSLRAEDTAVYYCYYRGFWGQGTLVTVSSGGGGSGGGSEVQLVESGGGLVQPGGSLKLSCAASGFTFNKYAINWVRQAPGKGLEWVARIRSKYNNYATYYADQVKDRFTISRDDSKNTAYLQMNNLKTEDTAVYYCVRHANFGNSYISYWAYWGQGTLVTVSSGGGGSGGGGSGGGGSQTVVTQEPSLTVSPGGTVTLTCASSTGAVTSGNYPNWVQQKPGQAPRGLIGGTKFLVPGTPARFSGSLLGGKAALTLSGVQPEDEAEYYCTLWYSNRWVFGGGTKLTVLGGGGSGGGSEVQLVESGGGLVQPGNSLRLSCAASGFTFSKFGMSWVRQAPGKGLEWVSSISGSGRDTLYADSVKGRFTISRDNAKTTLYLQMNSLRPEDTAVYYCTIGGSLSVSSQGTLVTVSSHHHHHH

SEQ ID NO: 3654 - protein, 505 aa, synthetic construct
  REGION 1..505: note = Description of Artificial Sequence: Synthetic polypeptide
VVGGGGEVQLVESGGGLVQPGNSLRLSCAASGFTFSKFGMSWVRQAPGKGLEWVSSISGSGRDTLYADSVKGRFTISRDNAKTTLYLQMNSLRPEDTAVYYCTIGGSLSVSSQGTLVTVSSGGGGSGGGSEVQLVESGGGLVQPGGSLKLSCAASGFTFNKYAINWVRQAPGKGLEWVARIRSKYNNYATYYADQVKDRFTISRDDSKNTAYLQMNNLKTEDTAVYYCVRHANFGNSYISYWAYWGQGTLVTVSSGGGGSGGGGSGGGGSQTVVTQEPSLTVSPGGTVTLTCASSTGAVTSGNYPNWVQQKPGQAPRGLIGGTKFLVPGTPARFSGSLLGGKAALTLSGVQPEDEAEYYCTLWYSNRWVFGGGTKLTVLGGGGSGGGSEVQLVESGGGLVQPGGSLTLSCAASGSTFSINHFSWYRQAPGKQRELVAFISSDGVSIDVESVKGRFTISGDNSKNTAYLQMNSLRAEDTAVYYCYYRGFWGQGTLVTVSSHHHHHH

SEQ ID NO: 3655 - protein, 505 aa, synthetic construct
  REGION 1..505: note = Description of Artificial Sequence: Synthetic polypeptide
VVGGGGEVQLVESGGGLVQPGNSLRLSCAASGFTFSKFGMSWVRQAPGKGLEWVSSISGSGRDTLYADSVKGRFTISRDNAKTTLYLQMNSLRPEDTAVYYCTIGGSLSVSSQGTLVTVSSGGGGSGGGSEVQLVESGGGLVQPGGSLTLSCAASGSTFSINHFSWYRQAPGKQRELVAFISSDGVSIDVESVKGRFTISGDNSKNTAYLQMNSLRAEDTAVYYCYYRGFWGQGTLVTVSSGGGGSGGGSEVQLVESGGGLVQPGGSLKLSCAASGFTFNKYAINWVRQAPGKGLEWVARIRSKYNNYATYYADQVKDRFTISRDDSKNTAYLQMNNLKTEDTAVYYCVRHANFGNSYISYWAYWGQGTLVTVSSGGGGSGGGGSGGGGSQTVVTQEPSLTVSPGGTVTLTCASSTGAVTSGNYPNWVQQKPGQAPRGLIGGTKFLVPGTPARFSGSLLGGKAALTLSGVQPEDEAEYYCTLWYSNRWVFGGGTKLTVLHHHHHH

SEQ ID NO: 3656 - protein, 505 aa, synthetic construct
  REGION 1..505: note = Description of Artificial Sequence: Synthetic polypeptide
VVGGGGEVQLVESGGGLVQPGGSLKLSCAASGFTFNKYAINWVRQAPGKGLEWVARIRSKYNNYATYYADQVKDRFTISRDDSKNTAYLQMNNLKTEDTAVYYCVRHANFGNSYISYWAYWGQGTLVTVSSGGGGSGGGGSGGGGSQTVVTQEPSLTVSPGGTVTLTCASSTGAVTSGNYPNWVQQKPGQAPRGLIGGTKFLVPGTPARFSGSLLGGKAALTLSGVQPEDEAEYYCTLWYSNRWVFGGGTKLTVLGGGGSGGGSEVQLVESGGGLVQPGNSLRLSCAASGFTFSKFGMSWVRQAPGKGLEWVSSISGSGRDTLYADSVKGRFTISRDNAKTTLYLQMNSLRPEDTAVYYCTIGGSLSVSSQGTLVTVSSGGGGSGGGSEVQLVESGGGLVQPGGSLTLSCAASGSTFSINHFSWYRQAPGKQRELVAFISSDGVSIDVESVKGRFTISGDNSKNTAYLQMNSLRAEDTAVYYCYYRGFWGQGTLVTVSSHHHHHH

SEQ ID NO: 3657 - protein, 505 aa, synthetic construct
  REGION 1..505: note = Description of Artificial Sequence: Synthetic polypeptide
VVGGGGEVQLVESGGGLVQPGGSLKLSCAASGFTFNKYAINWVRQAPGKGLEWVARIRSKYNNYATYYADQVKDRFTISRDDSKNTAYLQMNNLKTEDTAVYYCVRHANFGNSYISYWAYWGQGTLVTVSSGGGGSGGGGSGGGGSQTVVTQEPSLTVSPGGTVTLTCASSTGAVTSGNYPNWVQQKPGQAPRGLIGGTKFLVPGTPARFSGSLLGGKAALTLSGVQPEDEAEYYCTLWYSNRWVFGGGTKLTVLGGGGSGGGSEVQLVESGGGLVQPGGSLTLSCAASGSTFSINHFSWYRQAPGKQRELVAFISSDGVSIDVESVKGRFTISGDNSKNTAYLQMNSLRAEDTAVYYCYYRGFWGQGTLVTVSSGGGGSGGGSEVQLVESGGGLVQPGNSLRLSCAASGFTFSKFGMSWVRQAPGKGLEWVSSISGSGRDTLYADSVKGRFTISRDNAKTTLYLQMNSLRPEDTAVYYCTIGGSLSVSSQGTLVTVSSHHHHHH

SEQ ID NO: 3658 - protein, 505 aa, synthetic construct
  REGION 1..505: note = Description of Artificial Sequence: Synthetic polypeptide
VVGGGGEVQLVESGGGLVQPGGSLTLSCAASGSTFSINHFSWYRQAPGKQRELVAFISSDGVSIDVESVKGRFTISGDNSKNTAYLQMNSLRAEDTAVYYCYYRGFWGQGTLVTVSSGGGGSGGGSEVQLVESGGGLVQPGGSLKLSCAASGFTFNKYAINWVRQAPGKGLEWVARIRSKYNNYATYYADQVKDRFTISRDDSKNTAYLQMNNLKTEDTAVYYCVRHANFGNSYISYWAYWGQGTLVTVSSGGGGSGGGGSGGGGSQTVVTQEPSLTVSPGGTVTLTCASSTGAVTSGNYPNWVQQKPGQAPRGLIGGTKFLVPGTPARFSGSLLGGKAALTLSGVQPEDEAEYYCTLWYSNRWVFGGGTKLTVLGGGGSGGGSEVQLVESGGGLVQPGNSLRLSCAASGFTFSKFGMSWVRQAPGKGLEWVSSISGSGRDTLYADSVKGRFTISRDNAKTTLYLQMNSLRPEDTAVYYCTIGGSLSVSSQGTLVTVSSHHHHHH

SEQ ID NO: 3659 - protein, 528 aa, synthetic construct
  REGION 1..528: note = Description of Artificial Sequence: Synthetic polypeptide
QEGNEEGGGGSGGGGSGGGGSGGGQVQLVESGGGVVQAGGSLTLSCAASGSTFSIRAMRWYRQAPGTERDLVAVIYGSSTYYADAVKGRFTISRDNSKNTLYLQMNSLRAEDTAVYYCNADTIGTARDYWGQGTLVTVSSGGGGSGGGSEVQLVESGGGLVQPGNSLRLSCAASGFTFSKFGMSWVRQAPGKGLEWVSSISGSGRDTLYADSVKGRFTISRDNAKTTLYLQMNSLRPEDTAVYYCTIGGSLSVSSQGTLVTVSSGGGGSGGGSEVQLVESGGGLVQPGGSLKLSCAASGFTFNKYAINWVRQAPGKGLEWVARIRSKYNNYATYYADQVKDRFTISRDDSKNTAYLQMNNLKTEDTAVYYCVRHANFGNSYISYWAYWGQGTLVTVSSGGGGSGGGGSGGGGSQTVVTQEPSLTVSPGGTVTLTCASSTGAVTSGNYPNWVQQKPGQAPRGLIGGTKFLVPGTPARFSGSLLGGKAALTLSGVQPEDEAEYYCTLWYSNRWVFGGGTKLTVLHHHHHH

SEQ ID NO: 3660 - protein, 528 aa, synthetic construct
  REGION 1..528: note = Description of Artificial Sequence: Synthetic polypeptide
QDANEEGGGGSGGGGSGGGGSGGGQVQLVESGGGVVQAGGSLTLSCAASGSTFSIRAMRWYRQAPGTERDLVAVIYGSSTYYADAVKGRFTISRDNSKNTLYLQMNSLRAEDTAVYYCNADTIGTARDYWGQGTLVTVSSGGGGSGGGSEVQLVESGGGLVQPGNSLRLSCAASGFTFSKFGMSWVRQAPGKGLEWVSSISGSGRDTLYADSVKGRFTISRDNAKTTLYLQMNSLRPEDTAVYYCTIGGSLSVSSQGTLVTVSSGGGGSGGGSEVQLVESGGGLVQPGGSLKLSCAASGFTFNKYAINWVRQAPGKGLEWVARIRSKYNNYATYYADQVKDRFTISRDDSKNTAYLQMNNLKTEDTAVYYCVRHANFGNSYISYWAYWGQGTLVTVSSGGGGSGGGGSGGGGSQTVVTQEPSLTVSPGGTVTLTCASSTGAVTSGNYPNWVQQKPGQAPRGLIGGTKFLVPGTPARFSGSLLGGKAALTLSGVQPEDEAEYYCTLWYSNRWVFGGGTKLTVLHHHHHH

SEQ ID NO: 3661 - protein, 528 aa, synthetic construct
  REGION 1..528: note = Description of Artificial Sequence: Synthetic polypeptide
QDGNEEGGGGSGGGGSGGGGSGGGQVQLVESGGGVVQAGGSLTLSCAASGSTFSIRAMRWYRQAPGTERDLVAVIYGSSTYYADAVKGRFTISRDNSKNTLYLQMNSLRAEDTAVYYCNADTIGTARDYWGQGTLVTVSSGGGGSGGGSEVQLVESGGGLVQPGNSLRLSCAASGFTFSKFGMSWVRQAPGKGLEWVSSISGSGRDTLYADSVKGRFTISRDNAKTTLYLQMNSLRPEDTAVYYCTIGGSLSVSSQGTLVTVSSGGGGSGGGSEVQLVESGGGLVQPGGSLKLSCAASGFTFNKYAINWVRQAPGKGLEWVARIRSKYNNYATYYADQVKDRFTISRDDSKNTAYLQMNNLKTEDTAVYYCVRHANFGNSYISYWAYWGQGTLVTVSSGGGGSGGGGSGGGGSQTVVTQEPSLTVSPGGTVTLTCASSTGAVTSGNYPNWVQQKPGQAPRGLIGGTKFLVPGTPARFSGSLLGGKAALTLSGVQPEDEAEYYCTLWYSNRWVFGGGTKLTVLHHHHHH

SEQ ID NO: 3662 - protein, 508 aa, synthetic construct
  REGION 1..508: note = Description of Artificial Sequence: Synthetic polypeptide
SGGGQVQLVESGGGVVQAGGSLTLSCAASGSTFSIRAMRWYRQAPGTERDLVAVIYGSSTYYADAVKGRFTISRDNSKNTLYLQMNSLRAEDTAVYYCNADTIGTARDYWGQGTLVTVSSGGGGSGGGSEVQLVESGGGLVQPGNSLRLSCAASGFTFSKFGMSWVRQAPGKGLEWVSSISGSGRDTLYADSVKGRFTISRDNAKTTLYLQMNSLRPEDTAVYYCTIGGSLSVSSQGTLVTVSSGGGGSGGGSEVQLVESGGGLVQPGGSLKLSCAASGFTFNKYAINWVRQAPGKGLEWVARIRSKYNNYATYYADQVKDRFTISRDDSKNTAYLQMNNLKTEDTAVYYCVRHANFGNSYISYWAYWGQGTLVTVSSGGGGSGGGGSGGGGSQTVVTQEPSLTVSPGGTVTLTCASSTGAVTSGNYPNWVQQKPGQAPRGLIGGTKFLVPGTPARFSGSLLGGKAALTLSGVQPEDEAEYYCTLWYSNRWVFGGGTKLTVLHHHHHH

SEQ ID NO: 3663 - protein, 6 aa, synthetic construct
  REGION 1..6: note = Description of Artificial Sequence: Synthetic peptide
QDGNEE

SEQ ID NO: 3664 - protein, 6 aa, synthetic construct
  REGION 1..6: note = Description of Artificial Sequence: Synthetic peptide
LDGNEE

SEQ ID NO: 3665 - protein, 6 aa, synthetic construct
  REGION 1..6: note = Description of Artificial Sequence: Synthetic peptide
PDGNEE

SEQ ID NO: 3666 - protein, 6 aa, synthetic construct
  REGION 1..6: note = Description of Artificial Sequence: Synthetic peptide
DDGNEE

SEQ ID NO: 3667 - protein, 6 aa, synthetic construct
  REGION 1..6: note = Description of Artificial Sequence: Synthetic peptide
EDGNEE

SEQ ID NO: 3668 - protein, 6 aa, synthetic construct
  REGION 1..6: note = Description of Artificial Sequence: Synthetic peptide
NDGNEE

SEQ ID NO: 3669 - protein, 6 aa, synthetic construct
  REGION 1..6: note = Description of Artificial Sequence: Synthetic peptide
QEGNEE

SEQ ID NO: 3670 - protein, 6 aa, synthetic construct
  REGION 1..6: note = Description of Artificial Sequence: Synthetic peptide
QNGNEE

SEQ ID NO: 3671 - protein, 6 aa, synthetic construct
  REGION 1..6: note = Description of Artificial Sequence: Synthetic peptide
QQGNEE

SEQ ID NO: 3672 - protein, 6 aa, synthetic construct
  REGION 1..6: note = Description of Artificial Sequence: Synthetic peptide
QDANEE

SEQ ID NO: 3673 - protein, 6 aa, synthetic construct
  REGION 1..6: note = Description of Artificial Sequence: Synthetic peptide
QDSNEE

SEQ ID NO: 3674 - protein, 6 aa, synthetic construct
  REGION 1..6: note = Description of Artificial Sequence: Synthetic peptide
QDGQEE

SEQ ID NO: 3675 - protein, 6 aa, synthetic construct
  REGION 1..6: note = Description of Artificial Sequence: Synthetic peptide
QDGDEE

SEQ ID NO: 3676 - protein, 6 aa, synthetic construct
  REGION 1..6: note = Description of Artificial Sequence: Synthetic peptide
QDGEEE

SEQ ID NO: 3677 - protein, 6 aa, synthetic construct
  REGION 1..6: note = Description of Artificial Sequence: Synthetic peptide
QDGNDE

SEQ ID NO: 3678 - protein, 6 aa, synthetic construct
  REGION 1..6: note = Description of Artificial Sequence: Synthetic peptide
QDGNQE

SEQ ID NO: 3679 - protein, 6 aa, synthetic construct
  REGION 1..6: note = Description of Artificial Sequence: Synthetic peptide
QDGNNE

SEQ ID NO: 3680 - protein, 6 aa, synthetic construct
  REGION 1..6: note = Description of Artificial Sequence: Synthetic peptide
QDGNED

SEQ ID NO: 3681 - protein, 6 aa, synthetic construct
  REGION 1..6: note = Description of Artificial Sequence: Synthetic peptide
QDGNEQ

SEQ ID NO: 3682 - protein, 6 aa, synthetic construct
  REGION 1..6: note = Description of Artificial Sequence: Synthetic peptide
QDGNEN

SEQ ID NO: 3683 - protein, 10 aa, synthetic construct
  REGION 1..10: note = Description of Artificial Sequence: Synthetic peptide
SGGGGSGGVV

SEQ ID NO: 3684 - protein, 16 aa, synthetic construct
  REGION 1..16: note = Description of Artificial Sequence: Synthetic peptide
SGGGGSGGGGSGGGGS

SEQ ID NO: 3685 - protein, 17 aa, synthetic construct
  REGION 1..17: note = Description of Artificial Sequence: Synthetic peptide
SGGGGSGGGGSGGGGGS

SEQ ID NO: 3686 - protein, 10 aa, synthetic construct
  REGION 1..10: note = Description of Artificial Sequence: Synthetic peptide
SGGGGSGGGS

SEQ ID NO: 3687 - protein, 18 aa, synthetic construct
  REGION 1..18: note = Description of Artificial Sequence: Synthetic peptide
GGGGSGGGGSGGGGSGGG

SEQ ID NO: 3688 - protein, 10 aa, synthetic construct
  REGION 1..10: note = Description of Artificial Sequence: Synthetic peptide
KPLGLQARVV

SEQ ID NO: 3689 - protein, 10 aa, synthetic construct
  REGION 1..10: note = Description of Artificial Sequence: Synthetic peptide
PQASTGRSGG

SEQ ID NO: 3690 - protein, 10 aa, synthetic construct
  REGION 1..10: note = Description of Artificial Sequence: Synthetic peptide
PQGSTGRAAG

SEQ ID NO: 3691 - protein, 10 aa, synthetic construct
  REGION 1..10: note = Description of Artificial Sequence: Synthetic peptide
PPASSGRAGG

SEQ ID NO: 3692 - protein, 10 aa, synthetic construct
  REGION 1..10: note = Description of Artificial Sequence: Synthetic peptide
PQGSTARSAG

SEQ ID NO: 3693 - protein, 9 aa, synthetic construct
  REGION 1..9: note = Description of Artificial Sequence: Synthetic peptide
PIPVQGRAH

SEQ ID NO: 3694 - protein, 10 aa, synthetic construct
  REGION 1..10: note = Description of Artificial Sequence: Synthetic peptide
VANLASTGRA

SEQ ID NO: 3695 - protein, 9 aa, synthetic construct
  REGION 1..9: note = Description of Artificial Sequence: Synthetic peptide
PLGLSTGRA

SEQ ID NO: 3696 - protein, 8 aa, synthetic construct
  REGION 1..8: note = Description of Artificial Sequence: Synthetic peptide
PQASTGRA

SEQ ID NO: 3697 - protein, 10 aa, synthetic construct
  REGION 1..10: note = Description of Artificial Sequence: Synthetic peptide
PKPQASTGRA

SEQ ID NO: 3698 - protein, 10 aa, synthetic construct
  REGION 1..10: note = Description of Artificial Sequence: Synthetic peptide
PTGLESTGRA

SEQ ID NO: 3699 - protein, 10 aa, synthetic construct
  REGION 1..10: note = Description of Artificial Sequence: Synthetic peptide
PENFFSTGRA

SEQ ID NO: 3700 - protein, 10 aa, synthetic construct
  REGION 1..10: note = Description of Artificial Sequence: Synthetic peptide
AATLKSTGRA

SEQ ID NO: 3701 - protein, 10 aa, synthetic construct
  REGION 1..10: note = Description of Artificial Sequence: Synthetic peptide
PQDLLSTGRA

SEQ ID NO: 3702 - protein, 9 aa, synthetic construct
  REGION 1..9: note = Description of Artificial Sequence: Synthetic peptide
PAGLSTGRA

SEQ ID NO: 3703 - protein, 9 aa, synthetic construct
  REGION 1..9: note = Description of Artificial Sequence: Synthetic peptide
VLGLSTGRA

SEQ ID NO: 3704 - protein, 9 aa, synthetic construct
  REGION 1..9: note = Description of Artificial Sequence: Synthetic peptide
VANLASTGA

SEQ ID NO: 3705 - protein, 8 aa, synthetic construct
  REGION 1..8: note = Description of Artificial Sequence: Synthetic peptide
PLGLSTGA

SEQ ID NO: 3706 - protein, 7 aa, synthetic construct
  REGION 1..7: note = Description of Artificial Sequence: Synthetic peptide
PQASTGA

SEQ ID NO: 3707 - protein, 9 aa, synthetic construct
  REGION 1..9: note = Description of Artificial Sequence: Synthetic peptide
PKPQASTGA

SEQ ID NO: 3708 - protein, 9 aa, synthetic construct
  REGION 1..9: note = Description of Artificial Sequence: Synthetic peptide
PTGLESTGA

SEQ ID NO: 3709 - protein, 9 aa, synthetic construct
  REGION 1..9: note = Description of Artificial Sequence: Synthetic peptide
PENFFSTGA

SEQ ID NO: 3710 - protein, 9 aa, synthetic construct
  REGION 1..9: note = Description of Artificial Sequence: Synthetic peptide
AATLKSTGA

SEQ ID NO: 3711 - protein, 9 aa, synthetic construct
  REGION 1..9: note = Description of Artificial Sequence: Synthetic peptide
PQDLLSTGA

SEQ ID NO: 3712 - protein, 8 aa, synthetic construct
  REGION 1..8: note = Description of Artificial Sequence: Synthetic peptide
PAGLSTGA

SEQ ID NO: 3713 - protein, 8 aa, synthetic construct
  REGION 1..8: note = Description of Artificial Sequence: Synthetic peptide
VLGLSTGA

SEQ ID NO: 3714 - protein, 9 aa, synthetic construct
  REGION 1..9: note = Description of Artificial Sequence: Synthetic peptide
RTRYEDGGS

SEQ ID NO: 3715 - protein, 9 aa, synthetic construct
  REGION 1..9: note = Description of Artificial Sequence: Synthetic peptide
PQASTGGSG

SEQ ID NO: 3716 - protein, 5 aa, synthetic construct
  REGION 1..5: note = Description of Artificial Sequence: Synthetic peptide
VANLA

SEQ ID NO: 3717 - protein, 4 aa, synthetic construct
  REGION 1..4: note = Description of Artificial Sequence: Synthetic peptide
PLGL

SEQ ID NO: 3718 - protein, 4 aa, synthetic construct
  REGION 1..4: note = Description of Artificial Sequence: Synthetic peptide
PQAS

SEQ ID NO: 3719 - protein, 5 aa, synthetic construct
  REGION 1..5: note = Description of Artificial Sequence: Synthetic peptide
PKPQA

SEQ ID NO: 3720 - protein, 5 aa, synthetic construct
  REGION 1..5: note = Description of Artificial Sequence: Synthetic peptide
PTGLE

SEQ ID NO: 3721 - protein, 5 aa, synthetic construct
  REGION 1..5: note = Description of Artificial Sequence: Synthetic peptide
PENFF

SEQ ID NO: 3722 - protein, 5 aa, synthetic construct
  REGION 1..5: note = Description of Artificial Sequence: Synthetic peptide
AATLK

SEQ ID NO: 3723 - protein, 5 aa, synthetic construct
  REGION 1..5: note = Description of Artificial Sequence: Synthetic peptide
PQDLL

SEQ ID NO: 3724 - protein, 4 aa, synthetic construct
  REGION 1..4: note = Description of Artificial Sequence: Synthetic peptide
PAGL

SEQ ID NO: 3725 - protein, 4 aa, synthetic construct
  REGION 1..4: note = Description of Artificial Sequence: Synthetic peptide
VLGL

SEQ ID NO: 3726 - protein, 6 aa, synthetic construct
  REGION 1..6: note = Description of Artificial Sequence: Synthetic peptide
RLQLKL

SEQ ID NO: 3727 - protein, 6 aa, synthetic construct
  REGION 1..6: note = Description of Artificial Sequence: Synthetic peptide
RTRYED

SEQ ID NO: 3728 - protein, 5 aa, synthetic construct
  REGION 1..5: note = Description of Artificial Sequence: Synthetic peptide
KPLGL

SEQ ID NO: 3729 - protein, 8 aa, synthetic construct
  REGION 1..8: note = Description of Artificial Sequence: Synthetic peptide
KRALGLPG

SEQ ID NO: 3730 - protein, 40 aa, synthetic construct
  REGION 1..40: note = Description of Artificial Sequence: Synthetic polypeptide
DEDEDEDEDEDEDEDERPLALWRSDRDRDRDRDRDRDRDR

SEQ ID NO: 3731 - skipped

SEQ ID NO: 3732 - protein, 5 aa, synthetic construct
  REGION 1..5: note = Description of Artificial Sequence: Synthetic peptide
LEATA

SEQ ID NO: 3733 - protein, 10 aa, synthetic construct
  REGION 1..10: note = Description of Artificial Sequence: Synthetic peptide
GGAANLVRGG

SEQ ID NO: 3734 - protein, 10 aa, synthetic construct
  REGION 1..10: note = Description of Artificial Sequence: Synthetic peptide
SGRIGFLRTA

SEQ ID NO: 3735 - protein, 6 aa, synthetic construct
  REGION 1..6: note = Description of Artificial Sequence: Synthetic peptide
PLGLAG

SEQ ID NO: 3736 - protein, 6 aa, synthetic construct
  REGION 1..6: note = Description of Artificial Sequence: Synthetic peptide
  VARIANT 6: note = MOD_RES - Any amino acid
PLGLAX

SEQ ID NO: 3737 - protein, 6 aa, synthetic construct
  REGION 1..6: note = Description of Artificial Sequence: Synthetic peptide
  SITE 4: note = MOD_RES - S-methylcysteine (Cys(me))
PLGCAG

SEQ ID NO: 3738 - protein, 8 aa, synthetic construct
  REGION 1..8: note = Description of Artificial Sequence: Synthetic peptide
ESPAYYTA

SEQ ID NO: 3739 - protein, 6 aa, synthetic construct
  REGION 1..6: note = Description of Artificial Sequence: Synthetic peptide
RLQLKL

SEQ ID NO: 3740 - protein, 7 aa, synthetic construct
  REGION 1..7: note = Description of Artificial Sequence: Synthetic peptide
RLQLKAC

SEQ ID NO: 3741 - protein, 7 aa, synthetic construct
  REGION 1..7: note = Description of Artificial Sequence: Synthetic peptide
  SITE 3: note = MOD_RES - Citrulline (Cit)
  SITE 5: note = MOD_RES - Homophenylanine (Hof)
EPXGXYL

SEQ ID NO: 3742 - protein, 5 aa, synthetic construct
  REGION 1..5: note = Description of Artificial Sequence: Synthetic peptide
SGRSA

SEQ ID NO: 3743 - protein, 4 aa, synthetic construct
  REGION 1..4: note = Description of Artificial Sequence: Synthetic peptide
DAFK

SEQ ID NO: 3744 - protein, 5 aa, synthetic construct
  REGION 1..5: note = Description of Artificial Sequence: Synthetic peptide
GGGRR

SEQ ID NO: 3745 - protein, 4 aa, synthetic construct
  REGION 1..4: note = Description of Artificial Sequence: Synthetic peptide
GFLG

SEQ ID NO: 3746 - protein, 4 aa, synthetic construct
  REGION 1..4: note = Description of Artificial Sequence: Synthetic peptide
ALAL

SEQ ID NO: 3747-3748 - skipped (2 entries)

SEQ ID NO: 3749 - protein, 5 aa, synthetic construct
  REGION 1..5: note = Description of Artificial Sequence: Synthetic peptide
  SITE 3: note = MOD_RES - S-ethylcysteine (Cys(Et))
PICFF

SEQ ID NO: 3750 - protein, 8 aa, synthetic construct
  REGION 1..8: note = Description of Artificial Sequence: Synthetic peptide
GGPRGLPG

SEQ ID NO: 3751 - protein, 6 aa, synthetic construct
  REGION 1..6: note = Description of Artificial Sequence: Synthetic peptide
HSSKLQ

SEQ ID NO: 3752 - protein, 7 aa, synthetic construct
  REGION 1..7: note = Description of Artificial Sequence: Synthetic peptide
HSSKLQL

SEQ ID NO: 3753 - protein, 9 aa, synthetic construct
  REGION 1..9: note = Description of Artificial Sequence: Synthetic peptide
HSSKLQEDA

SEQ ID NO: 3754 - protein, 10 aa, synthetic construct
  REGION 1..10: note = Description of Artificial Sequence: Synthetic peptide
LVLASSSFGY

SEQ ID NO: 3755 - protein, 10 aa, synthetic construct
  REGION 1..10: note = Description of Artificial Sequence: Synthetic peptide
GVSQNYPIVG

SEQ ID NO: 3756 - protein, 10 aa, synthetic construct
  REGION 1..10: note = Description of Artificial Sequence: Synthetic peptide
GVVQASCRLA

SEQ ID NO: 3757 - skipped

SEQ ID NO: 3758 - protein, 6 aa, synthetic construct
  REGION 1..6: note = Description of Artificial Sequence: Synthetic peptide
DPRSFL

SEQ ID NO: 3759 - protein, 6 aa, synthetic construct
  REGION 1..6: note = Description of Artificial Sequence: Synthetic peptide
PPRSFL

SEQ ID NO: 3760 - protein, 4 aa, synthetic construct
  REGION 1..4: note = Description of Artificial Sequence: Synthetic peptide
DEVD

SEQ ID NO: 3761 - protein, 5 aa, synthetic construct
  REGION 1..5: note = Description of Artificial Sequence: Synthetic peptide
DEVDP

SEQ ID NO: 3762 - protein, 8 aa, synthetic construct
  REGION 1..8: note = Description of Artificial Sequence: Synthetic peptide
KGSGDVEG

SEQ ID NO: 3763 - protein, 6 aa, synthetic construct
  REGION 1..6: note = Description of Artificial Sequence: Synthetic peptide
GWEHDG

SEQ ID NO: 3764 - protein, 7 aa, synthetic construct
  REGION 1..7: note = Description of Artificial Sequence: Synthetic peptide
EDDDDKA

SEQ ID NO: 3765 - protein, 9 aa, synthetic construct
  REGION 1..9: note = Description of Artificial Sequence: Synthetic peptide
KQEQNPGST

SEQ ID NO: 3766 - protein, 6 aa, synthetic construct
  REGION 1..6: note = Description of Artificial Sequence: Synthetic peptide
GKAFRR

SEQ ID NO: 3767 - protein, 4 aa, synthetic construct
  REGION 1..4: note = Description of Artificial Sequence: Synthetic peptide
DAFK

SEQ ID NO: 3768 - protein, 4 aa, synthetic construct
  REGION 1..4: note = Description of Artificial Sequence: Synthetic peptide
DVLK

SEQ ID NO: 3769 - protein, 4 aa, synthetic construct
  REGION 1..4: note = Description of Artificial Sequence: Synthetic peptide
DAFK

SEQ ID NO: 3770 - protein, 7 aa, synthetic construct
  REGION 1..7: note = Description of Artificial Sequence: Synthetic peptide
ALLLALL

SEQ ID NO: 3771 - protein, 241 aa, synthetic construct
  REGION 1..241: note = Description of Artificial Sequence: Synthetic polypeptide
ENVLTQSPATLSVTPGEKATITCRASQSVSYMHWYQQKPGQAPRLLIYDASNRASGVPSRFSGSGSGTDHTLTISSLEAEDAATYYCFQGSVYPFTFGQGTKLEIKGGGGSGGGGSGGGGSQVTLRESGPALVKPTQTLTLTCTFSGFSLSTSGMGVGWIRQPPGKALEWLAHIWWDDDKRYNPALKSRLTISKDTSKNQVFLTMTNMDPVDTATYYCARMELWSYYFDYWGQGTTVTVSS

SEQ ID NO: 3772 - protein, 248 aa, synthetic construct
  REGION 1..248: note = Description of Artificial Sequence: Synthetic polypeptide
QVQLVQSGAEVKKPGASVKVSCKASGYTFTDYIMHWVRQAPGQGLEWMGYINPYNDGSKYTEKFQGRVTMTSDTSISTAYMELSRLRSDDTAVYYCARGTYYYGPQLFDYWGQGTTVTVSSGGGGSGGGGSGGGGSDIVMTQTPLSLSVTPGQPASISCKSSQSLETSTGTTYLNWYLQKPGQSPQLLIYRVSKRFSGVPDRFSGSGSGTDFTLKISRVEAEDVGVYYCLQLLEDPYTFGQGTKLEIK

SEQ ID NO: 3773 - protein, 242 aa, synthetic construct
  REGION 1..242: note = Description of Artificial Sequence: Synthetic polypeptide
QVQLQESGPGLVKPSQTLSLTCTVSGGSISTSGMGVGWIRQHPGKGLEWIGHIWWDDDKRYNPALKSRVTISVDTSKNQFSLKLSSVTAADTAVYYCARMELWSYYFDYWGQGTLVTVSSGGGGSGGGGSGGGGSEIVLTQSPATLSLSPGERATLSCSASSSVSYMHWYQQKPGQAPRLLIYDTSKLASGIPARFSGSGSGTDFTLTISSLEPEDFAVYYCFQGSVYPFTFGQGTKLEIKR

SEQ ID NO: 3774 - protein, 249 aa, synthetic construct
  REGION 1..249: note = Description of Artificial Sequence: Synthetic polypeptide
QTVVTQEPSVSAAPGQKVTISCSGSSSNIGNNYVSWYQQLPGTAPKLLIYDNNKRPSGIPDRFSGSKSGTSATLGITGLQTGDEADYYCGTWDSSLSAGVFGTGTKLTVLGSRGGGGSGGGGSGGGGSLEMAQVQLVETGGGLVQPGGSLRLSCAASGFTFSSYAMSWVRQAPGKGLEWVSAISGSGGSTYYADSVKGRFTISRDNSKNTLYLQMNSLRAEDTAVYYCARYYYSRLDYWGQGTLVTVSS

SEQ ID NO: 3775 - protein, 249 aa, synthetic construct
  REGION 1..249: note = Description of Artificial Sequence: Synthetic polypeptide
QSVLTQPPSVSAAPGQKVTISCSGSSSNIGNNYVSWYRQLPGTAPKLLIYENNKRPSGIPDRFSGSKSGTSATLGITGLQTGDEADYYCGTWDSSLRAGVFGTGTKVTVLGSRGGGGSGGGGSGGGGSLEMAQVQLVESGGGLVQPGGSLRLSCAASGFTFSSYAMSWVRQAPGKGLEWVSGISASGGSTYYADSVKGRFTISRDNSKNTLYLQMNSLRAEDTAVYYCARYYLSQIDSWGQGTLVTVSS

SEQ ID NO: 3776 - protein, 251 aa, synthetic construct
  REGION 1..251: note = Description of Artificial Sequence: Synthetic polypeptide
QSVLTQPPSASGTPGQRVTISCSGSSSNIGSNTVNWYQQLPGTAPKLLIYSNNQRPSGVPDRFSGSKSGTSASLAISGLQSEDEADYYCAAWDDSLNGHVVFGGGTKLTVLGSRGGGGSGGGGSGGGGSLEMAEVQLVQSGAEVKKPGATVKISCKVSGYTFTDYYMHWVQQAPGKGLEWMGLVDPEDGETIYAEKFQGRVTITADTSTDTAYMELSSLRSEDTAVYYCATGIYSRPLGYWGQGTLVTVSS

SEQ ID NO: 3777 - protein, 253 aa, synthetic construct
  REGION 1..253: note = Description of Artificial Sequence: Synthetic polypeptide
SYVLTQPPSASGTPGQRVTISCSGSSSNIGSHTVNWYQQLPGTAPKLLIYSNNQRPSGVPDRFSGSKSGTSASLAISGLQSEDEADYYCAAWDDSLNGYVFGTGTKVTVLGSRGGGGSGGGGSGGGGSLEMAEVQLVETGGGLVQPGGSLRLSCAASGFTFSSYAMSWVRQAPGKGLEWVSAISGSGGSTYYADSVKGRFTISRDNSKNTLYLQMNSLRAEDTAVYYCARSDGKHFWQQYDAWGQGTLVTVSS

SEQ ID NO: 3778 - protein, 243 aa, synthetic construct
  REGION 1..243: note = Description of Artificial Sequence: Synthetic polypeptide
DIQLTQSPSSLSAYVGDRVTITCRASQGITNSLAWYQQKPGKAPKLLLHAASRLESGVPSRFSGSGFGTDFTLTISSLQPEDFAVYYCQHYLGTPYSFGQGTKVEIKRSRGGGGSGGGGSGGGGSLEMAEVQLVESGGGLVQPGGSLRLSCAASGFTVSSNYMSWVRQAPGKGLEWVSAISGSGGSTYYADSVKGRFTISRDNSKNTLYLQMNSLRAEDTAVYYCARMNIDYWGQGTLVTVSS

SEQ ID NO: 3779 - protein, 253 aa, synthetic construct
  REGION 1..253: note = Description of Artificial Sequence: Synthetic polypeptide
EIVLTQSPSSLSASVGDRVTISCRASQSVSRFLNWYQQKPGKAPKLLIYGVSTLERGVPSRFSGSGSGTDFTLTISSLQPEDFATYYCQESYIIPLTFGGGTKLEIKRSRGGGGSGGGGSGGGGSLEMAEVQLVQSGAEVKRPGESLTISCKGSEYSFASYWITWVRQMPGKGLEWMGRIDPSDSYTNYSPSFQGHVTISADKSISTAYLQWSSLKASDTAIYYCARPFQYDYGGYSDAFDIWGQGTMVTVSS

SEQ ID NO: 3780 - protein, 251 aa, synthetic construct
  REGION 1..251: note = Description of Artificial Sequence: Synthetic polypeptide
EIVMTQSPLSLSVTPGEPASISCRSSQSLLDSNGFNSLDWYLQKPGQSPQLLIHLGSDRASGVPDRFSGSGSGTDFTLKISRVEAEDVGIYYCMQSLQIPTFGQGTKVEIKRSRGGGGSGGGGSGGGGSLEMAQMQLVQSGAEVKKAGSSVKVSCETSGGTFSSSSVNWVRQAPGQGLEWMGGIIPIVGTPNYAQKFQDRVTITAVESTFTAYMELSGLRSEDTAVYYCARGGYRDYMDVWGRGTTVTVSS

SEQ ID NO: 3781 - protein, 249 aa, synthetic construct
  REGION 1..249: note = Description of Artificial Sequence: Synthetic polypeptide
SYELTQPPSASGTPGQRVTISCSGSSSNIGSNYVYWYQQLPGTAPKLLIYRNNQRPSGVPDRFSGSKSGTSASLAISGLRSEDEADYYCAAWDDSLSGYVFGTGTKVTVLGSRGGGGSGGGGSGGGGSLEMAEVQLVESGGGLIQPGGSLRLSCAASGFTVSSNYMSWVRQAPGKGLEWVSVIYSGGSTYYADSVKGRFTISRDNSKNTLYLQMNSLRAEDTAVYYCARGGFGAEFDYWGQGTLVTVSS

SEQ ID NO: 3782 - protein, 252 aa, synthetic construct
  REGION 1..252: note = Description of Artificial Sequence: Synthetic polypeptide
SYVLTQPPSVSVSPGQTASITCSGDKLGDKYASWYQQKPGQSPVLVIYQDNKRPSGIPERFSGSNSGNTATLTISGTQAMDEADYYCQAWDSSTEDVFGPGTKVTVLGSRGGGGSGGGGSGGGGSLEMAEVQLVESGGGLIQPGGSLRLSCAASGFTVSSNYMSWVRQAPGKGLEWVSVIYSGGSTYYADSVKGRFTISRDNSKNTLYLQMNSLRAEDTAVYYCARGGISDDYYGSGSYDNWGQGTLVTVSS

SEQ ID NO: 3783 - protein, 247 aa, synthetic construct
  REGION 1..247: note = Description of Artificial Sequence: Synthetic polypeptide
DIQLTQSPSSLSASVGDRVTITCRASQSISSYLNWYQQKPGKAPKLLIYAASSLQSGVPSRFSGSGSGTDFTLTISSLQPEDFATYYCQQSYSTPFTFGGGTKVEIKRSRGGGGSGGGGSGGGGSLEMAEVQLVESGGGLVQPGGSLRLSCAASGFTVSSNYMSWVRQAPGKGLEWVSVIYSGGSTYYADSVKGRFTISRDNSKNTLYLQMNSLRAEDTAVYYCARERGMGYAFDIWGQGTMVTVSS

SEQ ID NO: 3784 - protein, 240 aa, synthetic construct
  REGION 1..240: note = Description of Artificial Sequence: Synthetic polypeptide
DIQMTQSPSSLSASVGDRVTITCRASQGIGSYLAWYQQKPGKAPKLLIYPASTLQSGVPSRFSGSGSGTEFTLTISSLQPEDFATYYCQQLNSLFGQGTRLEIKRSRGGGGSGGGGSGGGGSLEMAQLQLQESGPGLVKPSETLSLTCSVSGVSMSENYWSWIRQPPGKRLEWIGCAHYTGDTHYNPSLKGRVTISLDTSMNQFSLRLNSVTAADTAVYYCASYHPFNYWGQGTLVTVSS

SEQ ID NO: 3785 - protein, 258 aa, synthetic construct
  REGION 1..258: note = Description of Artificial Sequence: Synthetic polypeptide
QAVLTQPPSASGTPGQRVTISCSGSSSNIGTKTVNWYQVLPGTAPKLLIYSNYRRPSGVPDRFSGSKSGTSASLAISGLQSDDEADYYCALWDDSLDGYVFGTGTKVTVLGSRGGGGSGGGGSGGGGSLEMAEVQLVQSGAEVRRPGATVKISCKVSGYTFNDFYLHWVRQAPGKGLEWMGRIDPEDGKTRYAEKFQGRLTITADTSTDTLYMQLGGLTSDDTAVYYCTTDWGYSSSLREEDIWYDCWGQGTLVTVSS

SEQ ID NO: 3786 - protein, 252 aa, synthetic construct
  REGION 1..252: note = Description of Artificial Sequence: Synthetic polypeptide
SYELTQPPSVSVAPGKTARITCGGNNIGSKSVHWYQQKPGQAPVLVIYYDSDRPSGIPERFSGSNSGNTATLTISRVEAGDEADYYCQVWDSSSDHYVFGTGTKVTVLGSRGGGGSGGGGSGGGGSLEMAEVQLVQSGAEVKKPGSSVKVSCKASGGTFSSYAISWVRQAPGQGLEWMGGIIPIFGTANYAQKFQGRVTITADESTSTAYMELSSLRSEDTAVYYCARDYGYGDYGDAFDIWGQGTMVTVSS

SEQ ID NO: 3787 - protein, 251 aa, synthetic construct
  REGION 1..251: note = Description of Artificial Sequence: Synthetic polypeptide
SYVLTQPPSVSVAPGKTARITCGGNNIGSKSVHWYQQRPGQAPVLVVYDDSDRPSGIPERFSGSNSGNTATLTISRVEAGDEADYSCQVWDSSSDHYVFGPGTKVTVLGSRGGGGSGGGGSGGGGSLEMAEVQLVQSGAEVKKPGESLKISCKGSGYSFTSYWIGWVRQMPGKGLEWMGIIYPGDSDTRYSPSFQGQVTISADKSISTAYLQWSSLKASDTAMYYCARVVGTIYSMQYDVWGQGTLVTVSS

SEQ ID NO: 3788 - protein, 260 aa, synthetic construct
  REGION 1..260: note = Description of Artificial Sequence: Synthetic polypeptide
LPVLTQPPSVSVAPGKTARITCGGNNIGSKSVHWYQQKPGQAPVLVVYDDSDRPSGIPERFSGSNSGNTATLTISRVEAGDEADYYCQVWDSSSDYVVFGGGTKLTVLGSRGGGGSGGGGSGGGGSLEMAEVQLVQSGAEVKKPGESLKISCKGSGYSFTSYWIGWVRQMPGKGLEWMGIIYPGDSDTRYSPSFQGQVTISADKSISTAYLQWSSLKASDTAMYYCARQVWGWQGGMYPRSNWWYNMDSWGQGTLVTVSS

SEQ ID NO: 3789 - protein, 253 aa, synthetic construct
  REGION 1..253: note = Description of Artificial Sequence: Synthetic polypeptide
QAVLTQPPSVSEAPRQRVTISCSGSSSNVGNNAVNWYQQVPGKAPKLLIYYDDLLSSGVSDRFSGSKSGTSASLAISGLQSEDEADYYCAAWDDSLNGPVFGGGTKLTVLGSRGGGGSGGGGSGGGGSLEMAEVQLVQSGAEVKKPGESLKISCKGSGYSFTSYWIGWVRQMPGKGLEWMGIIYPGDSDTRYSPSFQGQVTISADKSISTAYLQWSSLKASDTAMYYCARWSSTWDSMYMDYWGQGTLVTVSS

SEQ ID NO: 3790 - protein, 252 aa, synthetic construct
  REGION 1..252: note = Description of Artificial Sequence: Synthetic polypeptide
QPVLTQPPSVSVAPGKTARITCGGNNIGSESVHWYQQKPGQAPMVVIYYDSNRPSGIPERFSGSNSGNTATLTVSRVEAEDEADYYCQVWNSSSDHRGVFGGGTKLTVLGSRGGGGSGGGGSGGGGSLEMAEVQLVQSGAEVKKPGESLRISCKGSGYSFTSYWIGWVRQMPGKGLEWMGIIYPGDSDTRYSPSFQGQVTISADKSISTAYLQWSSLKASDTAMYYCARVTYSMDSYYFDSWGQGTLVTVSS

SEQ ID NO: 3791 - protein, 120 aa, synthetic construct
  REGION 1..120: note = Description of Artificial Sequence: Synthetic polypeptide
EVKLQESGPGLVAPSQSLSVTCTVSGVSLPDYGVSWIRQPPRKGLEWLGVIWGSETTYYNSALKSRLTIIKDNSKSQVFLKMNSLQTDDTAIYYCAKHYYYGGSYAMDYWGQGTSVTVSS

SEQ ID NO: 3792 - protein, 107 aa, synthetic construct
  REGION 1..107: note = Description of Artificial Sequence: Synthetic polypeptide
DIQMTQTTSSLSASLGDRVTISCRASQDISKYLNWYQQKPDGTVKLLIYHTSRLHSGVPSRFSGSGSGTDYSLTISNLEQEDIATYFCQQGNTLPYTFGGGTKLEIT

SEQ ID NO: 3793 - protein, 241 aa, synthetic construct; identical to SEQ ID NO: 3771
  REGION 1..241: note = Description of Artificial Sequence: Synthetic polypeptide

SEQ ID NO: 3794 - protein, 125 aa, synthetic construct
  REGION 1..125: note = Description of Artificial Sequence: Synthetic polypeptide
EVQLQASGGGLVQVGGSLRLSCTASGSTESIKHHGWYRRAPGNQREWVAGISSENITNVAEAVEGRFTISRDNAKNTVYLQMNSLKVEDTAVYYCYAQDNDYRFLHRFWGQGTQVTVSIEPKTPK

SEQ ID NO: 3795 - protein, 125 aa, synthetic construct
  REGION 1..125: note = Description of Artificial Sequence: Synthetic polypeptide
DVQLQASGGGLVQAGGSLRLSCAASGSTESIKHHGWYRRAPGNQREWVAGINSENITNVAGAVKGRFTISRDNAKNITYLQMNSLKVEDTAVYFCYAQDNDYRFLHRFWGQGTQVITSLEPKTPK

SEQ ID NO: 3796 - protein, 125 aa, synthetic construct
  REGION 1..125: note = Description of Artificial Sequence: Synthetic polypeptide
DVQLQASGGGLVQAGGSLRLSCAASGSTFSIKHHGWYRRAPGNQREWVAGINSENITNVAGAVKGRFTISRDNAKNTVYLQMNSLKVEDTAVYFCYAQDNDYRFLHRFWGQGTQVTVSLEPKTPK

SEQ ID NO: 3797 - protein, 125 aa, synthetic construct; identical to SEQ ID NO: 3796
  REGION 1..125: note = Description of Artificial Sequence: Synthetic polypeptide

SEQ ID NO: 3798 - protein, 125 aa, synthetic construct
  REGION 1..125: note = Description of Artificial Sequence: Synthetic polypeptide
DVQLQASGGGLVQAEGSLRLSCAASGSTEGIKHHGWYRRAPGNQREWVAGISSENITNVAEAVKGRFTISRDNAKNITYLQMNSLKVEDTAVYYCYAQDNNYRFLHRFWGQGTQVITSLEPKTPK

SEQ ID NO: 3799 - protein, 125 aa, synthetic construct
  REGION 1..125: note = Description of Artificial Sequence: Synthetic polypeptide
DVQLQASGGGLVQAGGSLRLSCAASGSTESIKHHGWYRRAPGNQREWVAGISSENITNVAEAVKGRFTISRDNAKNITYLQMNSLKVEDTAVYYCYAQDNDYRFLHRFWGQGTQVITSLEPKTPK

SEQ ID NO: 3800 - protein, 125 aa, synthetic construct
  REGION 1..125: note = Description of Artificial Sequence: Synthetic polypeptide
DVQLQASGGGLVQAGGSLRLSCAASGSTFSIKHHGWYRRAPGNQREWVAGISSENITNVAEAVKGRFTISRDNAKNTVYLQMNSLKVEDTAVYYCYAQDNDYRFLHRFWGQGTQVTVSLEPKTPK

SEQ ID NO: 3801 - protein, 125 aa, synthetic construct; identical to SEQ ID NO: 3800
  REGION 1..125: note = Description of Artificial Sequence: Synthetic polypeptide

SEQ ID NO: 3802 - protein, 125 aa, synthetic construct; identical to SEQ ID NO: 3800
  REGION 1..125: note = Description of Artificial Sequence: Synthetic polypeptide

SEQ ID NO: 3803 - protein, 125 aa, synthetic construct; identical to SEQ ID NO: 3800
  REGION 1..125: note = Description of Artificial Sequence: Synthetic polypeptide

SEQ ID NO: 3804 - protein, 125 aa, synthetic construct; identical to SEQ ID NO: 3800
  REGION 1..125: note = Description of Artificial Sequence: Synthetic polypeptide

SEQ ID NO: 3805 - protein, 125 aa, synthetic construct; identical to SEQ ID NO: 3800
  REGION 1..125: note = Description of Artificial Sequence: Synthetic polypeptide

SEQ ID NO: 3806 - protein, 125 aa, synthetic construct; identical to SEQ ID NO: 3800
  REGION 1..125: note = Description of Artificial Sequence: Synthetic polypeptide

SEQ ID NO: 3807 - protein, 125 aa, synthetic construct; identical to SEQ ID NO: 3800
  REGION 1..125: note = Description of Artificial Sequence: Synthetic polypeptide

SEQ ID NO: 3808 - protein, 125 aa, synthetic construct; identical to SEQ ID NO: 3800
  REGION 1..125: note = Description of Artificial Sequence: Synthetic polypeptide

SEQ ID NO: 3809 - protein, 126 aa, synthetic construct
  REGION 1..126: note = Description of Artificial Sequence: Synthetic polypeptide
EVQLAESGGGLVQAGGSLRLSCTASGFTFDDYVMGWFRQAPGKEREGVSCISWSGDTTYYADSVKGRFTASRDNAKNTLYLQMNSLKPEDTAMYYCAADQGKCSLASAEPDDMDYWGRGTLVTVSS

SEQ ID NO: 3810 - protein, 121 aa, synthetic construct
  REGION 1..121: note = Description of Artificial Sequence: Synthetic polypeptide
EVQLAESGGGSVQAGGSLRLSCAASGVTFSSTSVAWFRQAPGKEREGVAYIYTGDSSTYYADSVKGRFTIAQDNAKNAVYLQMNSLKPEDTAMYYCAADGFLLNHRSYQYWGQGTQVTVSS

SEQ ID NO: 3811 - protein, 127 aa, synthetic construct
  REGION 1..127: note = Description of Artificial Sequence: Synthetic polypeptide
EVQLVESGGGSVQAGGSLRLSCAASGYTYSINCMGWFRQAPGKEREGVAVISTGGGRTDYRDSVKGRFTISQDNAKNTVYLQMNSLKPEDTAMYYCAGKTTYPGYGCGLGRSAYNYWGQGTQVTVSS

SEQ ID NO: 3812 - protein, 126 aa, synthetic construct
  REGION 1..126: note = Description of Artificial Sequence: Synthetic polypeptide
QIQLVESGGGSVQAGGSLRLSCVASGYIGGHYYMGWFRQAPGKEREGVAAIDIDSDGRTRYAGSVQGRFTISQDNAKNTLHLQMSSLKPEDTGMYYCAVGVGWVPARLTPQAVSYWGKGTLVTVSS

SEQ ID NO: 3813 - protein, 128 aa, synthetic construct
  REGION 1..128: note = Description of Artificial Sequence: Synthetic polypeptide
EVQLVESGGGSVQAGGSLRLSCVASGYTYGINCMGWFRQAPGKEREGIAAISTGGGTTGVADSVKGRFTISQDNAKNTVYLQMNSLKPEDTAMYYCAARSTYSGYACVYSEVNGYNYRGQGTQVTVSS

SEQ ID NO: 3814 - protein, 126 aa, synthetic construct
  REGION 1..126: note = Description of Artificial Sequence: Synthetic polypeptide
EVQLVESGGGSVQAGGSLRLSCVASGYTWCRYDMSWYRQAPGKEREFVSGFDNDGTTSYADSVKGRFTISQDNDKNTVYLQMNSLKPEDTAMYYCKEDRSRGSLDGRVCPLSYDNWGQGTQVTVSS

SEQ ID NO: 3815 - protein, 124 aa, synthetic construct
  REGION 1..124: note = Description of Artificial Sequence: Synthetic polypeptide
EVQLVESGGGLVQAGGSLRLSCTASGFTFDDYVMGWFRQAPGKEREGVSCISWSGDTTYYADSVKGRFTVSRDNAKNTLYLQMNSLKPEDTAMYYCAADQSLCSLAPPYNYAYWGQGTQVTVSS

SEQ ID NO: 3816 - protein, 126 aa, synthetic construct
  REGION 1..126: note = Description of Artificial Sequence: Synthetic polypeptide
QVQLVESGGGLVQAGGSLRLSCTASGFTFDNYVMGWFRQAPGKEREGVSCIGWSGGSTYYADSVKGRFTISRDNAKNTLYLQMNSLKPEDTAMYYCAADQGKCSLGSAGADDMDYWGRGTLVTVSS

SEQ ID NO: 3817 - protein, 120 aa, synthetic construct
  REGION 1..120: note = Description of Artificial Sequence: Synthetic polypeptide
EVQLVESGGGSVQAGGSLRLSCAAPGYTYCTYDMMWYRQALGKEREFVSAVYTDGSTLYADSVKGRFTISQDNAKNTLYLQMNSLKPEDTAMYYCKTETAVTYDKPCDFWGQGTQVTVSS

SEQ ID NO: 3818 - protein, 124 aa, synthetic construct
  REGION 1..124: note = Description of Artificial Sequence: Synthetic polypeptide
QVQLVESGGGLVQPGGSLRLSCAASGSIFSITAMGWYRQAPGKQRELVATVTSGGSTKYVESVKGRFTISNDNAKNTVYLQMNSLKPEDTAVYYCWADIVARWNSDYNVYDDYWGQGTQVTVSS

SEQ ID NO: 3819 - protein, 121 aa, synthetic construct
  REGION 1..121: note = Description of Artificial Sequence: Synthetic polypeptide
QVKLEESGGGLVQEGGSLRLSCAASGTIYTDSTIYWYRQAPGKQRELVASITRGGDTKYVDSVKGRFAISSDNAKNTVYLQMNSLKPEDTAVYYCNLYYRTGPSSYYRNDWGQGTQVTVSS

SEQ ID NO: 3820 - protein, 112 aa, synthetic construct
  REGION 1..112: note = Description of Artificial Sequence: Synthetic polypeptide
AVQLVESGGGLVQPGGSLRLSCAVSGIYYSINLMGWYRQAPGKPRELAASITDSGITNYADSVKGRFTISRDNAKNTVHLQMNNLKPEDTAVYYCKPMGVNWGQGIQVTVSS

SEQ ID NO: 3821 - protein, 121 aa, synthetic construct
  REGION 1..121: note = Description of Artificial Sequence: Synthetic polypeptide
AVQLVESGGGLVQAGGSLRLSCTASGSILRTYEMGWYRQAPGSQRELVASITSDGDTNYVDSVKGRFTISRDNGKNMVYLQMNSLKPDDTAVYYCNAVILSPSYSMRTSHWGQGTQVTVSS

SEQ ID NO: 3822 - protein, 124 aa, synthetic construct
  REGION 1..124: note = Description of Artificial Sequence: Synthetic polypeptide
QVQLVESGGGLVQAGGSLRLSCAASGNVFRFNIMGWYRQAPGNQRELVASIDDGGDRSYADSVEGRFTISRENGKKIMYLQMNSLKPEDTAVYYCAAGLGTYLNGRVSMATNYWGQGTQVTVSS

SEQ ID NO: 3823 - protein, 121 aa, synthetic construct
  REGION 1..121: note = Description of Artificial Sequence: Synthetic polypeptide
EVQLVESGGGLVQAGGSLRLSCAASGDTFSFAAMGWYRQAPGKQRELVASISFSGGESTVYANSVRGRFTISGDNAKNRVSLEMNNLKPEDTAVYYCTAKRGPYLPGPEYWGQGTQVTVSS

SEQ ID NO: 3824 - protein, 523 aa, synthetic construct; identical to SEQ ID NO: 3600
  REGION 1..523: note = Description of Artificial Sequence: Synthetic polypeptide

SEQ ID NO: 3825 - protein, 523 aa, synthetic construct
  REGION 1..523: note = Description of Artificial Sequence: Synthetic polypeptide
LDGNEEGGGGKPLGLQARVVGGGGEVQLVESGGGLVQPGGSLTLSCAASRFMISEYHMHWVRQAPGKGLEWVSTINPAGTTDYAESVKGRFTISRDNAKNTLYLQMNSLKPEDTAVYYCDSYGYRGQGTQVTVSSGGGGSGGGSEVQLVESGGGLVQPGNSLRLSCAASGFTFSKFGMSWVRQAPGKGLEWVSSISGSGRDTLYADSVKGRFTISRDNAKTTLYLQMNSLRPEDTAVYYCTIGGSLSVSSQGTLVTVSSGGGGSGGGSEVQLVESGGGLVQPGGSLKLSCAASGFTFNKYAINWVRQAPGKGLEWVARIRSKYNNYATYYADQVKDRFTISRDDSKNTAYLQMNNLKTEDTAVYYCVRHANFGNSYISYWAYWGQGTLVTVSSGGGGSGGGGSGGGGSQTVVTQEPSLTVSPGGTVTLTCASSTGAVTSGNYPNWVQQKPGQAPRGLIGGTKFLVPGTPARFSGSLLGGKAALTLSGVQPEDEAEYYCTLWYSNRWVFGGGTKLTVLHHHHHH

SEQ ID NO: 3826 - protein, 523 aa, synthetic construct
  REGION 1..523: note = Description of Artificial Sequence: Synthetic polypeptide
PDGNEEGGGGKPLGLQARVVGGGGEVQLVESGGGLVQPGGSLTLSCAASRFMISEYHMHWVRQAPGKGLEWVSTINPAGTTDYAESVKGRFTISRDNAKNTLYLQMNSLKPEDTAVYYCDSYGYRGQGTQVTVSSGGGGSGGGSEVQLVESGGGLVQPGNSLRLSCAASGFTFSKFGMSWVRQAPGKGLEWVSSISGSGRDTLYADSVKGRFTISRDNAKTTLYLQMNSLRPEDTAVYYCTIGGSLSVSSQGTLVTVSSGGGGSGGGSEVQLVESGGGLVQPGGSLKLSCAASGFTFNKYAINWVRQAPGKGLEWVARIRSKYNNYATYYADQVKDRFTISRDDSKNTAYLQMNNLKTEDTAVYYCVRHANFGNSYISYWAYWGQGTLVTVSSGGGGSGGGGSGGGGSQTVVTQEPSLTVSPGGTVTLTCASSTGAVTSGNYPNWVQQKPGQAPRGLIGGTKFLVPGTPARFSGSLLGGKAALTLSGVQPEDEAEYYCTLWYSNRWVFGGGTKLTVLHHHHHH

SEQ ID NO: 3827 - protein, 523 aa, synthetic construct
  REGION 1..523: note = Description of Artificial Sequence: Synthetic polypeptide
DDGNEEGGGGKPLGLQARVVGGGGEVQLVESGGGLVQPGGSLTLSCAASRFMISEYHMHWVRQAPGKGLEWVSTINPAGTTDYAESVKGRFTISRDNAKNTLYLQMNSLKPEDTAVYYCDSYGYRGQGTQVTVSSGGGGSGGGSEVQLVESGGGLVQPGNSLRLSCAASGFTFSKFGMSWVRQAPGKGLEWVSSISGSGRDTLYADSVKGRFTISRDNAKTTLYLQMNSLRPEDTAVYYCTIGGSLSVSSQGTLVTVSSGGGGSGGGSEVQLVESGGGLVQPGGSLKLSCAASGFTFNKYAINWVRQAPGKGLEWVARIRSKYNNYATYYADQVKDRFTISRDDSKNTAYLQMNNLKTEDTAVYYCVRHANFGNSYISYWAYWGQGTLVTVSSGGGGSGGGGSGGGGSQTVVTQEPSLTVSPGGTVTLTCASSTGAVTSGNYPNWVQQKPGQAPRGLIGGTKFLVPGTPARFSGSLLGGKAALTLSGVQPEDEAEYYCTLWYSNRWVFGGGTKLTVLHHHHHH

SEQ ID NO: 3828 - protein, 523 aa, synthetic construct
  REGION 1..523: note = Description of Artificial Sequence: Synthetic polypeptide
EDGNEEGGGGKPLGLQARVVGGGGEVQLVESGGGLVQPGGSLTLSCAASRFMISEYHMHWVRQAPGKGLEWVSTINPAGTTDYAESVKGRFTISRDNAKNTLYLQMNSLKPEDTAVYYCDSYGYRGQGTQVTVSSGGGGSGGGSEVQLVESGGGLVQPGNSLRLSCAASGFTFSKFGMSWVRQAPGKGLEWVSSISGSGRDTLYADSVKGRFTISRDNAKTTLYLQMNSLRPEDTAVYYCTIGGSLSVSSQGTLVTVSSGGGGSGGGSEVQLVESGGGLVQPGGSLKLSCAASGFTFNKYAINWVRQAPGKGLEWVARIRSKYNNYATYYADQVKDRFTISRDDSKNTAYLQMNNLKTEDTAVYYCVRHANFGNSYISYWAYWGQGTLVTVSSGGGGSGGGGSGGGGSQTVVTQEPSLTVSPGGTVTLTCASSTGAVTSGNYPNWVQQKPGQAPRGLIGGTKFLVPGTPARFSGSLLGGKAALTLSGVQPEDEAEYYCTLWYSNRWVFGGGTKLTVLHHHHHH

SEQ ID NO: 3829 - protein, 523 aa, synthetic construct
  REGION 1..523: note = Description of Artificial Sequence: Synthetic polypeptide
QEGNEEGGGGKPLGLQARVVGGGGEVQLVESGGGLVQPGGSLTLSCAASRFMISEYHMHWVRQAPGKGLEWVSTINPAGTTDYAESVKGRFTISRDNAKNTLYLQMNSLKPEDTAVYYCDSYGYRGQGTQVTVSSGGGGSGGGSEVQLVESGGGLVQPGNSLRLSCAASGFTFSKFGMSWVRQAPGKGLEWVSSISGSGRDTLYADSVKGRFTISRDNAKTTLYLQMNSLRPEDTAVYYCTIGGSLSVSSQGTLVTVSSGGGGSGGGSEVQLVESGGGLVQPGGSLKLSCAASGFTFNKYAINWVRQAPGKGLEWVARIRSKYNNYATYYADQVKDRFTISRDDSKNTAYLQMNNLKTEDTAVYYCVRHANFGNSYISYWAYWGQGTLVTVSSGGGGSGGGGSGGGGSQTVVTQEPSLTVSPGGTVTLTCASSTGAVTSGNYPNWVQQKPGQAPRGLIGGTKFLVPGTPARFSGSLLGGKAALTLSGVQPEDEAEYYCTLWYSNRWVFGGGTKLTVLHHHHHH

SEQ ID NO: 3830 - protein, 523 aa, synthetic construct
  REGION 1..523: note = Description of Artificial Sequence: Synthetic polypeptide
QDANEEGGGGKPLGLQARVVGGGGEVQLVESGGGLVQPGGSLTLSCAASRFMISEYHMHWVRQAPGKGLEWVSTINPAGTTDYAESVKGRFTISRDNAKNTLYLQMNSLKPEDTAVYYCDSYGYRGQGTQVTVSSGGGGSGGGSEVQLVESGGGLVQPGNSLRLSCAASGFTFSKFGMSWVRQAPGKGLEWVSSISGSGRDTLYADSVKGRFTISRDNAKTTLYLQMNSLRPEDTAVYYCTIGGSLSVSSQGTLVTVSSGGGGSGGGSEVQLVESGGGLVQPGGSLKLSCAASGFTFNKYAINWVRQAPGKGLEWVARIRSKYNNYATYYADQVKDRFTISRDDSKNTAYLQMNNLKTEDTAVYYCVRHANFGNSYISYWAYWGQGTLVTVSSGGGGSGGGGSGGGGSQTVVTQEPSLTVSPGGTVTLTCASSTGAVTSGNYPNWVQQKPGQAPRGLIGGTKFLVPGTPARFSGSLLGGKAALTLSGVQPEDEAEYYCTLWYSNRWVFGGGTKLTVLHHHHHH

SEQ ID NO: 3831 - protein, 523 aa, synthetic construct
  REGION 1..523: note = Description of Artificial Sequence: Synthetic polypeptide
QDSNEEGGGGKPLGLQARVVGGGGEVQLVESGGGLVQPGGSLTLSCAASRFMISEYHMHWVRQAPGKGLEWVSTINPAGTTDYAESVKGRFTISRDNAKNTLYLQMNSLKPEDTAVYYCDSYGYRGQGTQVTVSSGGGGSGGGSEVQLVESGGGLVQPGNSLRLSCAASGFTFSKFGMSWVRQAPGKGLEWVSSISGSGRDTLYADSVKGRFTISRDNAKTTLYLQMNSLRPEDTAVYYCTIGGSLSVSSQGTLVTVSSGGGGSGGGSEVQLVESGGGLVQPGGSLKLSCAASGFTFNKYAINWVRQAPGKGLEWVARIRSKYNNYATYYADQVKDRFTISRDDSKNTAYLQMNNLKTEDTAVYYCVRHANFGNSYISYWAYWGQGTLVTVSSGGGGSGGGGSGGGGSQTVVTQEPSLTVSPGGTVTLTCASSTGAVTSGNYPNWVQQKPGQAPRGLIGGTKFLVPGTPARFSGSLLGGKAALTLSGVQPEDEAEYYCTLWYSNRWVFGGGTKLTVLHHHHHH

SEQ ID NO: 3832 - protein, 662 aa, synthetic construct
  REGION 1..662: note = Description of Artificial Sequence: Synthetic polypeptide
QDGNEEGGGGKPLGLQARVVGGGGEVQLVESGGGLVQPGNSLRLSCAASGFTFSKFGMSWVRQAPGKGLEWVSSISGSGRDTLYADSVKGRFTISRDNAKTTLYLQMNSLRPEDTAVYYCTIGGSLSVSSQGTLVTVSSGGGGSGGGSEVQLVESGGGLVQPGGSLKLSCAASGFTFNKYAINWVRQAPGKGLEWVARIRSKYNNYATYYADQVKDRFTISRDDSKNTAYLQMNNLKTEDTAVYYCVRHANFGNSYISYWAYWGQGTLVTVSSGGGGSGGGGSGGGGSQTVVTQEPSLTVSPGGTVTLTCASSTGAVTSGNYPNWVQQKPGQAPRGLIGGTKFLVPGTPARFSGSLLGGKAALTLSGVQPEDEAEYYCTLWYSNRWVFGGGTKLTVLGGGGSGGGSQVQLVQSGAEVKKPGESVKVSCKASGYTFTNYGMNWVKQAPGQGLEWMGWINTYTGEPTYADKFQGRVTMTTDTSTSTAYMEIRNLGGDDTAVYYCARWSWSDGYYVYFDYWGQGTSVTVSSGGGGSGGGGSGGGGSDIVMTQSPDSLTVSLGERTTINCKSSQSVLDSSTNKNSLAWYQQKPGQPPKLLLSWASTRESGIPDRFSGSGSGTDFTLTIDSPQPEDSATYYCQQSAHFPITFGQGTRLEIKHHHHHH

SEQ ID NO: 3833 - protein, 662 aa, synthetic construct
  REGION 1..662: note = Description of Artificial Sequence: Synthetic polypeptide
QDGNEEGGGGKPLGLQARVVGGGGEVQLVESGGGLVQPGNSLRLSCAASGFTFSKFGMSWVRQAPGKGLEWVSSISGSGRDTLYADSVKGRFTISRDNAKTTLYLQMNSLRPEDTAVYYCTIGGSLSVSSQGTLVTVSSGGGGSGGGSQVQLVQSGAEVKKPGESVKVSCKASGYTFTNYGMNWVKQAPGQGLEWMGWINTYTGEPTYADKFQGRVTMTTDTSTSTAYMEIRNLGGDDTAVYYCARWSWSDGYYVYFDYWGQGTSVTVSSGGGGSGGGGSGGGGSDIVMTQSPDSLTVSLGERTTINCKSSQSVLDSSTNKNSLAWYQQKPGQPPKLLLSWASTRESGIPDRFSGSGSGTDFTLTIDSPQPEDSATYYCQQSAHFPITFGQGTRLEIKGGGGSGGGSEVQLVESGGGLVQPGGSLKLSCAASGFTFNKYAINWVRQAPGKGLEWVARIRSKYNNYATYYADQVKDRFTISRDDSKNTAYLQMNNLKTEDTAVYYCVRHANFGNSYISYWAYWGQGTLVTVSSGGGGSGGGGSGGGGSQTVVTQEPSLTVSPGGTVTLTCASSTGAVTSGNYPNWVQQKPGQAPRGLIGGTKFLVPGTPARFSGSLLGGKAALTLSGVQPEDEAEYYCTLWYSNRWVFGGGTKLTVLHHHHHH

SEQ ID NO: 3834 - protein, 662 aa, synthetic construct
  REGION 1..662: note = Description of Artificial Sequence: Synthetic polypeptide
QDGNEEGGGGKPLGLQARVVGGGGEVQLVESGGGLVQPGGSLKLSCAASGFTFNKYAINWVRQAPGKGLEWVARIRSKYNNYATYYADQVKDRFTISRDDSKNTAYLQMNNLKTEDTAVYYCVRHANFGNSYISYWAYWGQGTLVTVSSGGGGSGGGGSGGGGSQTVVTQEPSLTVSPGGTVTLTCASSTGAVTSGNYPNWVQQKPGQAPRGLIGGTKFLVPGTPARFSGSLLGGKAALTLSGVQPEDEAEYYCTLWYSNRWVFGGGTKLTVLGGGGSGGGSEVQLVESGGGLVQPGNSLRLSCAASGFTFSKFGMSWVRQAPGKGLEWVSSISGSGRDTLYADSVKGRFTISRDNAKTTLYLQMNSLRPEDTAVYYCTIGGSLSVSSQGTLVTVSSGGGGSGGGSQVQLVQSGAEVKKPGESVKVSCKASGYTFTNYGMNWVKQAPGQGLEWMGWINTYTGEPTYADKFQGRVTMTTDTSTSTAYMEIRNLGGDDTAVYYCARWSWSDGYYVYFDYWGQGTSVTVSSGGGGSGGGGSGGGGSDIVMTQSPDSLTVSLGERTTINCKSSQSVLDSSTNKNSLAWYQQKPGQPPKLLLSWASTRESGIPDRFSGSGSGTDFTLTIDSPQPEDSATYYCQQSAHFPITFGQGTRLEIKHHHHHH

SEQ ID NO: 3835 - protein, 662 aa, synthetic construct
  REGION 1..662: note = Description of Artificial Sequence: Synthetic polypeptide
QDGNEEGGGGKPLGLQARVVGGGGEVQLVESGGGLVQPGGSLKLSCAASGFTFNKYAINWVRQAPGKGLEWVARIRSKYNNYATYYADQVKDRFTISRDDSKNTAYLQMNNLKTEDTAVYYCVRHANFGNSYISYWAYWGQGTLVTVSSGGGGSGGGGSGGGGSQTVVTQEPSLTVSPGGTVTLTCASSTGAVTSGNYPNWVQQKPGQAPRGLIGGTKFLVPGTPARFSGSLLGGKAALTLSGVQPEDEAEYYCTLWYSNRWVFGGGTKLTVLGGGGSGGGSQVQLVQSGAEVKKPGESVKVSCKASGYTFTNYGMNWVKQAPGQGLEWMGWINTYTGEPTYADKFQGRVTMTTDTSTSTAYMEIRNLGGDDTAVYYCARWSWSDGYYVYFDYWGQGTSVTVSSGGGGSGGGGSGGGGSDIVMTQSPDSLTVSLGERTTINCKSSQSVLDSSTNKNSLAWYQQKPGQPPKLLLSWASTRESGIPDRFSGSGSGTDFTLTIDSPQPEDSATYYCQQSAHFPITFGQGTRLEIKGGGGSGGGSEVQLVESGGGLVQPGNSLRLSCAASGFTFSKFGMSWVRQAPGKGLEWVSSISGSGRDTLYADSVKGRFTISRDNAKTTLYLQMNSLRPEDTAVYYCTIGGSLSVSSQGTLVTVSSHHHHHH

SEQ ID NO: 3836 - protein, 662 aa, synthetic construct
  REGION 1..662: note = Description of Artificial Sequence: Synthetic polypeptide
QDGNEEGGGGKPLGLQARVVGGGGQVQLVQSGAEVKKPGESVKVSCKASGYTFTNYGMNWVKQAPGQGLEWMGWINTYTGEPTYADKFQGRVTMTTDTSTSTAYMEIRNLGGDDTAVYYCARWSWSDGYYVYFDYWGQGTSVTVSSGGGGSGGGGSGGGGSDIVMTQSPDSLTVSLGERTTINCKSSQSVLDSSTNKNSLAWYQQKPGQPPKLLLSWASTRESGIPDRFSGSGSGTDFTLTIDSPQPEDSATYYCQQSAHFPITFGQGTRLEIKGGGGSGGGSEVQLVESGGGLVQPGNSLRLSCAASGFTFSKFGMSWVRQAPGKGLEWVSSISGSGRDTLYADSVKGRFTISRDNAKTTLYLQMNSLRPEDTAVYYCTIGGSLSVSSQGTLVTVSSGGGGSGGGSEVQLVESGGGLVQPGGSLKLSCAASGFTFNKYAINWVRQAPGKGLEWVARIRSKYNNYATYYADQVKDRFTISRDDSKNTAYLQMNNLKTEDTAVYYCVRHANFGNSYISYWAYWGQGTLVTVSSGGGGSGGGGSGGGGSQTVVTQEPSLTVSPGGTVTLTCASSTGAVTSGNYPNWVQQKPGQAPRGLIGGTKFLVPGTPARFSGSLLGGKAALTLSGVQPEDEAEYYCTLWYSNRWVFGGGTKLTVLHHHHHH

SEQ ID NO: 3837 - protein, 662 aa, synthetic construct
  REGION 1..662: note = Description of Artificial Sequence: Synthetic polypeptide
QDGNEEGGGGKPLGLQARVVGGGGQVQLVQSGAEVKKPGESVKVSCKASGYTFTNYGMNWVKQAPGQGLEWMGWINTYTGEPTYADKFQGRVTMTTDTSTSTAYMEIRNLGGDDTAVYYCARWSWSDGYYVYFDYWGQGTSVTVSSGGGGSGGGGSGGGGSDIVMTQSPDSLTVSLGERTTINCKSSQSVLDSSTNKNSLAWYQQKPGQPPKLLLSWASTRESGIPDRFSGSGSGTDFTLTIDSPQPEDSATYYCQQSAHFPITFGQGTRLEIKGGGGSGGGSEVQLVESGGGLVQPGGSLKLSCAASGFTFNKYAINWVRQAPGKGLEWVARIRSKYNNYATYYADQVKDRFTISRDDSKNTAYLQMNNLKTEDTAVYYCVRHANFGNSYISYWAYWGQGTLVTVSSGGGGSGGGGSGGGGSQTVVTQEPSLTVSPGGTVTLTCASSTGAVTSGNYPNWVQQKPGQAPRGLIGGTKFLVPGTPARFSGSLLGGKAALTLSGVQPEDEAEYYCTLWYSNRWVFGGGTKLTVLGGGGSGGGSEVQLVESGGGLVQPGNSLRLSCAASGFTFSKFGMSWVRQAPGKGLEWVSSISGSGRDTLYADSVKGRFTISRDNAKTTLYLQMNSLRPEDTAVYYCTIGGSLSVSSQGTLVTVSSHHHHHH

SEQ ID NO: 3838 - protein, 653 aa, synthetic construct
  REGION 1..653: note = Description of Artificial Sequence: Synthetic polypeptide
QDGNEEGGGGKPLGLQARVVGGGGEVQLVESGGGLVQPGNSLRLSCAASGFTFSKFGMSWVRQAPGKGLEWVSSISGSGRDTLYADSVKGRFTISRDNAKTTLYLQMNSLRPEDTAVYYCTIGGSLSVSSQGTLVTVSSGGGGSGGGSEVQLVESGGGLVQPGGSLKLSCAASGFTFNKYAINWVRQAPGKGLEWVARIRSKYNNYATYYADQVKDRFTISRDDSKNTAYLQMNNLKTEDTAVYYCVRHANFGNSYISYWAYWGQGTLVTVSSGGGGSGGGGSGGGGSQTVVTQEPSLTVSPGGTVTLTCASSTGAVTSGNYPNWVQQKPGQAPRGLIGGTKFLVPGTPARFSGSLLGGKAALTLSGVQPEDEAEYYCTLWYSNRWVFGGGTKLTVLGGGGSGGGSENVLTQSPATLSVTPGEKATITCRASQSVSYMHWYQQKPGQAPRLLIYDASNRASGVPSRFSGSGSGTDHTLTISSLEAEDAATYYCFQGSVYPFTFGQGTKLEIKGGGGSGGGGSGGGGSQVTLRESGPALVKPTQTLTLTCTFSGFSLSTSGMGVGWIRQPPGKALEWLAHIWWDDDKRYNPALKSRLTISKDTSKNQVFLTMTNMDPVDTATYYCARMELWSYYFDYWGQGTTVTVSSHHHHHH

SEQ ID NO: 3839 - protein, 653 aa, synthetic construct
  REGION 1..653: note = Description of Artificial Sequence: Synthetic polypeptide
QDGNEEGGGGKPLGLQARVVGGGGEVQLVESGGGLVQPGNSLRLSCAASGFTFSKFGMSWVRQAPGKGLEWVSSISGSGRDTLYADSVKGRFTISRDNAKTTLYLQMNSLRPEDTAVYYCTIGGSLSVSSQGTLVTVSSGGGGSGGGSENVLTQSPATLSVTPGEKATITCRASQSVSYMHWYQQKPGQAPRLLIYDASNRASGVPSRFSGSGSGTDHTLTISSLEAEDAATYYCFQGSVYPFTFGQGTKLEIKGGGGSGGGGSGGGGSQVTLRESGPALVKPTQTLTLTCTFSGFSLSTSGMGVGWIRQPPGKALEWLAHIWWDDDKRYNPALKSRLTISKDTSKNQVFLTMTNMDPVDTATYYCARMELWSYYFDYWGQGTTVTVSSGGGGSGGGSEVQLVESGGGLVQPGGSLKLSCAASGFTFNKYAINWVRQAPGKGLEWVARIRSKYNNYATYYADQVKDRFTISRDDSKNTAYLQMNNLKTEDTAVYYCVRHANFGNSYISYWAYWGQGTLVTVSSGGGGSGGGGSGGGGSQTVVTQEPSLTVSPGGTVTLTCASSTGAVTSGNYPNWVQQKPGQAPRGLIGGTKFLVPGTPARFSGSLLGGKAALTLSGVQPEDEAEYYCTLWYSNRWVFGGGTKLTVLHHHHHH

SEQ ID NO: 3840 - protein, 653 aa, synthetic construct
  REGION 1..653: note = Description of Artificial Sequence: Synthetic polypeptide
QDGNEEGGGGKPLGLQARVVGGGGEVQLVESGGGLVQPGGSLKLSCAASGFTFNKYAINWVRQAPGKGLEWVARIRSKYNNYATYYADQVKDRFTISRDDSKNTAYLQMNNLKTEDTAVYYCVRHANFGNSYISYWAYWGQGTLVTVSSGGGGSGGGGSGGGGSQTVVTQEPSLTVSPGGTVTLTCASSTGAVTSGNYPNWVQQKPGQAPRGLIGGTKFLVPGTPARFSGSLLGGKAALTLSGVQPEDEAEYYCTLWYSNRWVFGGGTKLTVLGGGGSGGGSEVQLVESGGGLVQPGNSLRLSCAASGFTFSKFGMSWVRQAPGKGLEWVSSISGSGRDTLYADSVKGRFTISRDNAKTTLYLQMNSLRPEDTAVYYCTIGGSLSVSSQGTLVTVSSGGGGSGGGSENVLTQSPATLSVTPGEKATITCRASQSVSYMHWYQQKPGQAPRLLIYDASNRASGVPSRFSGSGSGTDHTLTISSLEAEDAATYYCFQGSVYPFTFGQGTKLEIKGGGGSGGGGSGGGGSQVTLRESGPALVKPTQTLTLTCTFSGFSLSTSGMGVGWIRQPPGKALEWLAHIWWDDDKRYNPALKSRLTISKDTSKNQVFLTMTNMDPVDTATYYCARMELWSYYFDYWGQGTTVTVSSHHHHHH

SEQ ID NO: 3841 - protein, 653 aa, synthetic construct
  REGION 1..653: note = Description of Artificial Sequence: Synthetic polypeptide
QDGNEEGGGGKPLGLQARVVGGGGEVQLVESGGGLVQPGGSLKLSCAASGFTFNKYAINWVRQAPGKGLEWVARIRSKYNNYATYYADQVKDRFTISRDDSKNTAYLQMNNLKTEDTAVYYCVRHANFGNSYISYWAYWGQGTLVTVSSGGGGSGGGGSGGGGSQTVVTQEPSLTVSPGGTVTLTCASSTGAVTSGNYPNWVQQKPGQAPRGLIGGTKFLVPGTPARFSGSLLGGKAALTLSGVQPEDEAEYYCTLWYSNRWVFGGGTKLTVLGGGGSGGGSENVLTQSPATLSVTPGEKATITCRASQSVSYMHWYQQKPGQAPRLLIYDASNRASGVPSRFSGSGSGTDHTLTISSLEAEDAATYYCFQGSVYPFTFGQGTKLEIKGGGGSGGGGSGGGGSQVTLRESGPALVKPTQTLTLTCTFSGFSLSTSGMGVGWIRQPPGKALEWLAHIWWDDDKRYNPALKSRLTISKDTSKNQVFLTMTNMDPVDTATYYCARMELWSYYFDYWGQGTTVTVSSGGGGSGGGSEVQLVESGGGLVQPGNSLRLSCAASGFTFSKFGMSWVRQAPGKGLEWVSSISGSGRDTLYADSVKGRFTISRDNAKTTLYLQMNSLRPEDTAVYYCTIGGSLSVSSQGTLVTVSSHHHHHH

SEQ ID NO: 3842 - protein, 653 aa, synthetic construct
  REGION 1..653: note = Description of Artificial Sequence: Synthetic polypeptide
QDGNEEGGGGKPLGLQARVVGGGGENVLTQSPATLSVTPGEKATITCRASQSVSYMHWYQQKPGQAPRLLIYDASNRASGVPSRFSGSGSGTDHTLTISSLEAEDAATYYCFQGSVYPFTFGQGTKLEIKGGGGSGGGGSGGGGSQVTLRESGPALVKPTQTLTLTCTFSGFSLSTSGMGVGWIRQPPGKALEWLAHIWWDDDKRYNPALKSRLTISKDTSKNQVFLTMTNMDPVDTATYYCARMELWSYYFDYWGQGTTVTVSSGGGGSGGGSEVQLVESGGGLVQPGNSLRLSCAASGFTFSKFGMSWVRQAPGKGLEWVSSISGSGRDTLYADSVKGRFTISRDNAKTTLYLQMNSLRPEDTAVYYCTIGGSLSVSSQGTLVTVSSGGGGSGGGSEVQLVESGGGLVQPGGSLKLSCAASGFTFNKYAINWVRQAPGKGLEWVARIRSKYNNYATYYADQVKDRFTISRDDSKNTAYLQMNNLKTEDTAVYYCVRHANFGNSYISYWAYWGQGTLVTVSSGGGGSGGGGSGGGGSQTVVTQEPSLTVSPGGTVTLTCASSTGAVTSGNYPNWVQQKPGQAPRGLIGGTKFLVPGTPARFSGSLLGGKAALTLSGVQPEDEAEYYCTLWYSNRWVFGGGTKLTVLHHHHHH

SEQ ID NO: 3843 - protein, 653 aa, synthetic construct
  REGION 1..653: note = Description of Artificial Sequence: Synthetic polypeptide
QDGNEEGGGGKPLGLQARVVGGGGENVLTQSPATLSVTPGEKATITCRASQSVSYMHWYQQKPGQAPRLLIYDASNRASGVPSRFSGSGSGTDHTLTISSLEAEDAATYYCFQGSVYPFTFGQGTKLEIKGGGGSGGGGSGGGGSQVTLRESGPALVKPTQTLTLTCTFSGFSLSTSGMGVGWIRQPPGKALEWLAHIWWDDDKRYNPALKSRLTISKDTSKNQVFLTMTNMDPVDTATYYCARMELWSYYFDYWGQGTTVTVSSGGGGSGGGSEVQLVESGGGLVQPGGSLKLSCAASGFTFNKYAINWVRQAPGKGLEWVARIRSKYNNYATYYADQVKDRFTISRDDSKNTAYLQMNNLKTEDTAVYYCVRHANFGNSYISYWAYWGQGTLVTVSSGGGGSGGGGSGGGGSQTVVTQEPSLTVSPGGTVTLTCASSTGAVTSGNYPNWVQQKPGQAPRGLIGGTKFLVPGTPARFSGSLLGGKAALTLSGVQPEDEAEYYCTLWYSNRWVFGGGTKLTVLGGGGSGGGSEVQLVESGGGLVQPGNSLRLSCAASGFTFSKFGMSWVRQAPGKGLEWVSSISGSGRDTLYADSVKGRFTISRDNAKTTLYLQMNSLRPEDTAVYYCTIGGSLSVSSQGTLVTVSSHHHHHH

SEQ ID NO: 3844 - protein, 537 aa, synthetic construct
  REGION 1..537: note = Description of Artificial Sequence: Synthetic polypeptide
QDGNEEGGGGKPLGLQARVVGGGGEVQLVESGGGLVQPGNSLRLSCAASGFTFSKFGMSWVRQAPGKGLEWVSSISGSGRDTLYADSVKGRFTISRDNAKTTLYLQMNSLRPEDTAVYYCTIGGSLSVSSQGTLVTVSSGGGGSGGGSEVQLVESGGGLVQPGGSLKLSCAASGFTFNKYAINWVRQAPGKGLEWVARIRSKYNNYATYYADQVKDRFTISRDDSKNTAYLQMNNLKTEDTAVYYCVRHANFGNSYISYWAYWGQGTLVTVSSGGGGSGGGGSGGGGSQTVVTQEPSLTVSPGGTVTLTCASSTGAVTSGNYPNWVQQKPGQAPRGLIGGTKFLVPGTPARFSGSLLGGKAALTLSGVQPEDEAEYYCTLWYSNRWVFGGGTKLTVLGGGGSGGGSEVQLLESGGGLVQPGGSLTLSCAASGRTFSSYAMGWFRQAPGKEREFVAAISWSGSNTYYADSVKGRFTISRDNSKNTLYLQMNSLRAEDTAVYYCAAGGSTRVVVTTTPVVKYWGQGTLVTVSSHHHHHH

SEQ ID NO: 3845 - protein, 537 aa, synthetic construct
  REGION 1..537: note = Description of Artificial Sequence: Synthetic polypeptide
QDGNEEGGGGKPLGLQARVVGGGGEVQLVESGGGLVQPGNSLRLSCAASGFTFSKFGMSWVRQAPGKGLEWVSSISGSGRDTLYADSVKGRFTISRDNAKTTLYLQMNSLRPEDTAVYYCTIGGSLSVSSQGTLVTVSSGGGGSGGGSEVQLLESGGGLVQPGGSLTLSCAASGRTFSSYAMGWFRQAPGKEREFVAAISWSGSNTYYADSVKGRFTISRDNSKNTLYLQMNSLRAEDTAVYYCAAGGSTRVVVTTTPVVKYWGQGTLVTVSSGGGGSGGGSEVQLVESGGGLVQPGGSLKLSCAASGFTFNKYAINWVRQAPGKGLEWVARIRSKYNNYATYYADQVKDRFTISRDDSKNTAYLQMNNLKTEDTAVYYCVRHANFGNSYISYWAYWGQGTLVTVSSGGGGSGGGGSGGGGSQTVVTQEPSLTVSPGGTVTLTCASSTGAVTSGNYPNWVQQKPGQAPRGLIGGTKFLVPGTPARFSGSLLGGKAALTLSGVQPEDEAEYYCTLWYSNRWVFGGGTKLTVLHHHHHH

SEQ ID NO: 3846 - protein, 537 aa, synthetic construct
  REGION 1..537: note = Description of Artificial Sequence: Synthetic polypeptide
QDGNEEGGGGKPLGLQARVVGGGGEVQLVESGGGLVQPGGSLKLSCAASGFTFNKYAINWVRQAPGKGLEWVARIRSKYNNYATYYADQVKDRFTISRDDSKNTAYLQMNNLKTEDTAVYYCVRHANFGNSYISYWAYWGQGTLVTVSSGGGGSGGGGSGGGGSQTVVTQEPSLTVSPGGTVTLTCASSTGAVTSGNYPNWVQQKPGQAPRGLIGGTKFLVPGTPARFSGSLLGGKAALTLSGVQPEDEAEYYCTLWYSNRWVFGGGTKLTVLGGGGSGGGSEVQLVESGGGLVQPGNSLRLSCAASGFTFSKFGMSWVRQAPGKGLEWVSSISGSGRDTLYADSVKGRFTISRDNAKTTLYLQMNSLRPEDTAVYYCTIGGSLSVSSQGTLVTVSSGGGGSGGGSEVQLLESGGGLVQPGGSLTLSCAASGRTFSSYAMGWFRQAPGKEREFVAAISWSGSNTYYADSVKGRFTISRDNSKNTLYLQMNSLRAEDTAVYYCAAGGSTRVVVTTTPVVKYWGQGTLVTVSSHHHHHH

SEQ ID NO: 3847 - protein, 537 aa, synthetic construct
  REGION 1..537: note = Description of Artificial Sequence: Synthetic polypeptide
QDGNEEGGGGKPLGLQARVVGGGGEVQLVESGGGLVQPGGSLKLSCAASGFTFNKYAINWVRQAPGKGLEWVARIRSKYNNYATYYADQVKDRFTISRDDSKNTAYLQMNNLKTEDTAVYYCVRHANFGNSYISYWAYWGQGTLVTVSSGGGGSGGGGSGGGGSQTVVTQEPSLTVSPGGTVTLTCASSTGAVTSGNYPNWVQQKPGQAPRGLIGGTKFLVPGTPARFSGSLLGGKAALTLSGVQPEDEAEYYCTLWYSNRWVFGGGTKLTVLGGGGSGGGSEVQLLESGGGLVQPGGSLTLSCAASGRTFSSYAMGWFRQAPGKEREFVAAISWSGSNTYYADSVKGRFTISRDNSKNTLYLQMNSLRAEDTAVYYCAAGGSTRVVVTTTPVVKYWGQGTLVTVSSGGGGSGGGSEVQLVESGGGLVQPGNSLRLSCAASGFTFSKFGMSWVRQAPGKGLEWVSSISGSGRDTLYADSVKGRFTISRDNAKTTLYLQMNSLRPEDTAVYYCTIGGSLSVSSQGTLVTVSSHHHHHH

SEQ ID NO: 3848 - protein, 537 aa, synthetic construct
  REGION 1..537: note = Description of Artificial Sequence: Synthetic polypeptide
QDGNEEGGGGKPLGLQARVVGGGGEVQLLESGGGLVQPGGSLTLSCAASGRTFSSYAMGWFRQAPGKEREFVAAISWSGSNTYYADSVKGRFTISRDNSKNTLYLQMNSLRAEDTAVYYCAAGGSTRVVVTTTPVVKYWGQGTLVTVSSGGGGSGGGSEVQLVESGGGLVQPGNSLRLSCAASGFTFSKFGMSWVRQAPGKGLEWVSSISGSGRDTLYADSVKGRFTISRDNAKTTLYLQMNSLRPEDTAVYYCTIGGSLSVSSQGTLVTVSSGGGGSGGGSEVQLVESGGGLVQPGGSLKLSCAASGFTFNKYAINWVRQAPGKGLEWVARIRSKYNNYATYYADQVKDRFTISRDDSKNTAYLQMNNLKTEDTAVYYCVRHANFGNSYISYWAYWGQGTLVTVSSGGGGSGGGGSGGGGSQTVVTQEPSLTVSPGGTVTLTCASSTGAVTSGNYPNWVQQKPGQAPRGLIGGTKFLVPGTPARFSGSLLGGKAALTLSGVQPEDEAEYYCTLWYSNRWVFGGGTKLTVLHHHHHH

SEQ ID NO: 3849 - protein, 537 aa, synthetic construct
  REGION 1..537: note = Description of Artificial Sequence: Synthetic polypeptide
QDGNEEGGGGKPLGLQARVVGGGGEVQLLESGGGLVQPGGSLTLSCAASGRTFSSYAMGWFRQAPGKEREFVAAISWSGSNTYYADSVKGRFTISRDNSKNTLYLQMNSLRAEDTAVYYCAAGGSTRVVVTTTPVVKYWGQGTLVTVSSGGGGSGGGSEVQLVESGGGLVQPGGSLKLSCAASGFTFNKYAINWVRQAPGKGLEWVARIRSKYNNYATYYADQVKDRFTISRDDSKNTAYLQMNNLKTEDTAVYYCVRHANFGNSYISYWAYWGQGTLVTVSSGGGGSGGGGSGGGGSQTVVTQEPSLTVSPGGTVTLTCASSTGAVTSGNYPNWVQQKPGQAPRGLIGGTKFLVPGTPARFSGSLLGGKAALTLSGVQPEDEAEYYCTLWYSNRWVFGGGTKLTVLGGGGSGGGSEVQLVESGGGLVQPGNSLRLSCAASGFTFSKFGMSWVRQAPGKGLEWVSSISGSGRDTLYADSVKGRFTISRDNAKTTLYLQMNSLRPEDTAVYYCTIGGSLSVSSQGTLVTVSSHHHHHH

SEQ ID NO: 3850 - protein, 523 aa, synthetic construct
  REGION 1..523: note = Description of Artificial Sequence: Synthetic polypeptide
QDGNEEGGGGKPLGLQARVVGGGGEVQLVESGGGLVQPGNSLRLSCAASGFTFSKFGMSWVRQAPGKGLEWVSSISGSGRDTLYADSVKGRFTISRDNAKTTLYLQMNSLRPEDTAVYYCTIGGSLSVSSQGTLVTVSSGGGGSGGGSEVQLVESGGGLVQPGGSLKLSCAASGFTFNKYAINWVRQAPGKGLEWVARIRSKYNNYATYYADQVKDRFTISRDDSKNTAYLQMNNLKTEDTAVYYCVRHANFGNSYISYWAYWGQGTLVTVSSGGGGSGGGGSGGGGSQTVVTQEPSLTVSPGGTVTLTCASSTGAVTSGNYPNWVQQKPGQAPRGLIGGTKFLVPGTPARFSGSLLGGKAALTLSGVQPEDEAEYYCTLWYSNRWVFGGGTKLTVLGGGGSGGGSEVQLVESGGGLVQPGGSLTLSCAASGSTFSINHFSWYRQAPGKQRELVAFISSDGVSIDVESVKGRFTISGDNSKNTAYLQMNSLRAEDTAVYYCYYRGFWGQGTLVTVSSHHHHHH

SEQ ID NO: 3851 - protein, 523 aa, synthetic construct
  REGION 1..523: note = Description of Artificial Sequence: Synthetic polypeptide
QDGNEEGGGGKPLGLQARVVGGGGEVQLVESGGGLVQPGNSLRLSCAASGFTFSKFGMSWVRQAPGKGLEWVSSISGSGRDTLYADSVKGRFTISRDNAKTTLYLQMNSLRPEDTAVYYCTIGGSLSVSSQGTLVTVSSGGGGSGGGSEVQLVESGGGLVQPGGSLTLSCAASGSTFSINHFSWYRQAPGKQRELVAFISSDGVSIDVESVKGRFTISGDNSKNTAYLQMNSLRAEDTAVYYCYYRGFWGQGTLVTVSSGGGGSGGGSEVQLVESGGGLVQPGGSLKLSCAASGFTFNKYAINWVRQAPGKGLEWVARIRSKYNNYATYYADQVKDRFTISRDDSKNTAYLQMNNLKTEDTAVYYCVRHANFGNSYISYWAYWGQGTLVTVSSGGGGSGGGGSGGGGSQTVVTQEPSLTVSPGGTVTLTCASSTGAVTSGNYPNWVQQKPGQAPRGLIGGTKFLVPGTPARFSGSLLGGKAALTLSGVQPEDEAEYYCTLWYSNRWVFGGGTKLTVLHHHHHH

SEQ ID NO: 3852 - protein, 523 aa, synthetic construct
  REGION 1..523: note = Description of Artificial Sequence: Synthetic polypeptide
QDGNEEGGGGKPLGLQARVVGGGGEVQLVESGGGLVQPGGSLKLSCAASGFTFNKYAINWVRQAPGKGLEWVARIRSKYNNYATYYADQVKDRFTISRDDSKNTAYLQMNNLKTEDTAVYYCVRHANFGNSYISYWAYWGQGTLVTVSSGGGGSGGGGSGGGGSQTVVTQEPSLTVSPGGTVTLTCASSTGAVTSGNYPNWVQQKPGQAPRGLIGGTKFLVPGTPARFSGSLLGGKAALTLSGVQPEDEAEYYCTLWYSNRWVFGGGTKLTVLGGGGSGGGSEVQLVESGGGLVQPGNSLRLSCAASGFTFSKFGMSWVRQAPGKGLEWVSSISGSGRDTLYADSVKGRFTISRDNAKTTLYLQMNSLRPEDTAVYYCTIGGSLSVSSQGTLVTVSSGGGGSGGGSEVQLVESGGGLVQPGGSLTLSCAASGSTFSINHFSWYRQAPGKQRELVAFISSDGVSIDVESVKGRFTISGDNSKNTAYLQMNSLRAEDTAVYYCYYRGFWGQGTLVTVSSHHHHHH

SEQ ID NO: 3853 - protein, 523 aa, synthetic construct
  REGION 1..523: note = Description of Artificial Sequence: Synthetic polypeptide
QDGNEEGGGGKPLGLQARVVGGGGEVQLVESGGGLVQPGGSLKLSCAASGFTFNKYAINWVRQAPGKGLEWVARIRSKYNNYATYYADQVKDRFTISRDDSKNTAYLQMNNLKTEDTAVYYCVRHANFGNSYISYWAYWGQGTLVTVSSGGGGSGGGGSGGGGSQTVVTQEPSLTVSPGGTVTLTCASSTGAVTSGNYPNWVQQKPGQAPRGLIGGTKFLVPGTPARFSGSLLGGKAALTLSGVQPEDEAEYYCTLWYSNRWVFGGGTKLTVLGGGGSGGGSEVQLVESGGGLVQPGGSLTLSCAASGSTFSINHFSWYRQAPGKQRELVAFISSDGVSIDVESVKGRFTISGDNSKNTAYLQMNSLRAEDTAVYYCYYRGFWGQGTLVTVSSGGGGSGGGSEVQLVESGGGLVQPGNSLRLSCAASGFTFSKFGMSWVRQAPGKGLEWVSSISGSGRDTLYADSVKGRFTISRDNAKTTLYLQMNSLRPEDTAVYYCTIGGSLSVSSQGTLVTVSSHHHHHH

SEQ ID NO: 3854 - protein, 523 aa, synthetic construct
  REGION 1..523: note = Description of Artificial Sequence: Synthetic polypeptide
QDGNEEGGGGKPLGLQARVVGGGGEVQLVESGGGLVQPGGSLTLSCAASGSTFSINHFSWYRQAPGKQRELVAFISSDGVSIDVESVKGRFTISGDNSKNTAYLQMNSLRAEDTAVYYCYYRGFWGQGTLVTVSSGGGGSGGGSEVQLVESGGGLVQPGNSLRLSCAASGFTFSKFGMSWVRQAPGKGLEWVSSISGSGRDTLYADSVKGRFTISRDNAKTTLYLQMNSLRPEDTAVYYCTIGGSLSVSSQGTLVTVSSGGGGSGGGSEVQLVESGGGLVQPGGSLKLSCAASGFTFNKYAINWVRQAPGKGLEWVARIRSKYNNYATYYADQVKDRFTISRDDSKNTAYLQMNNLKTEDTAVYYCVRHANFGNSYISYWAYWGQGTLVTVSSGGGGSGGGGSGGGGSQTVVTQEPSLTVSPGGTVTLTCASSTGAVTSGNYPNWVQQKPGQAPRGLIGGTKFLVPGTPARFSGSLLGGKAALTLSGVQPEDEAEYYCTLWYSNRWVFGGGTKLTVLHHHHHH

SEQ ID NO: 3855 - protein, 523 aa, synthetic construct
  REGION 1..523: note = Description of Artificial Sequence: Synthetic polypeptide
QDGNEEGGGGKPLGLQARVVGGGGEVQLVESGGGLVQPGGSLTLSCAASGSTFSINHFSWYRQAPGKQRELVAFISSDGVSIDVESVKGRFTISGDNSKNTAYLQMNSLRAEDTAVYYCYYRGFWGQGTLVTVSSGGGGSGGGSEVQLVESGGGLVQPGGSLKLSCAASGFTFNKYAINWVRQAPGKGLEWVARIRSKYNNYATYYADQVKDRFTISRDDSKNTAYLQMNNLKTEDTAVYYCVRHANFGNSYISYWAYWGQGTLVTVSSGGGGSGGGGSGGGGSQTVVTQEPSLTVSPGGTVTLTCASSTGAVTSGNYPNWVQQKPGQAPRGLIGGTKFLVPGTPARFSGSLLGGKAALTLSGVQPEDEAEYYCTLWYSNRWVFGGGTKLTVLGGGGSGGGSEVQLVESGGGLVQPGNSLRLSCAASGFTFSKFGMSWVRQAPGKGLEWVSSISGSGRDTLYADSVKGRFTISRDNAKTTLYLQMNSLRPEDTAVYYCTIGGSLSVSSQGTLVTVSSHHHHHH

SEQ ID NO: 3856 - protein, 528 aa, synthetic construct
  REGION 1..528: note = Description of Artificial Sequence: Synthetic polypeptide
QEGNEEGGGGKPLGLQARVVGGGGQVQLVESGGGVVQAGGSLTLSCAASGSTFSIRAMRWYRQAPGTERDLVAVIYGSSTYYADAVKGRFTISRDNSKNTLYLQMNSLRAEDTAVYYCNADTIGTARDYWGQGTLVTVSSGGGGSGGGSEVQLVESGGGLVQPGNSLRLSCAASGFTFSKFGMSWVRQAPGKGLEWVSSISGSGRDTLYADSVKGRFTISRDNAKTTLYLQMNSLRPEDTAVYYCTIGGSLSVSSQGTLVTVSSGGGGSGGGSEVQLVESGGGLVQPGGSLKLSCAASGFTFNKYAINWVRQAPGKGLEWVARIRSKYNNYATYYADQVKDRFTISRDDSKNTAYLQMNNLKTEDTAVYYCVRHANFGNSYISYWAYWGQGTLVTVSSGGGGSGGGGSGGGGSQTVVTQEPSLTVSPGGTVTLTCASSTGAVTSGNYPNWVQQKPGQAPRGLIGGTKFLVPGTPARFSGSLLGGKAALTLSGVQPEDEAEYYCTLWYSNRWVFGGGTKLTVLHHHHHH

SEQ ID NO: 3857 - protein, 528 aa, synthetic construct
  REGION 1..528: note = Description of Artificial Sequence: Synthetic polypeptide
QDANEEGGGGKPLGLQARVVGGGGQVQLVESGGGVVQAGGSLTLSCAASGSTFSIRAMRWYRQAPGTERDLVAVIYGSSTYYADAVKGRFTISRDNSKNTLYLQMNSLRAEDTAVYYCNADTIGTARDYWGQGTLVTVSSGGGGSGGGSEVQLVESGGGLVQPGNSLRLSCAASGFTFSKFGMSWVRQAPGKGLEWVSSISGSGRDTLYADSVKGRFTISRDNAKTTLYLQMNSLRPEDTAVYYCTIGGSLSVSSQGTLVTVSSGGGGSGGGSEVQLVESGGGLVQPGGSLKLSCAASGFTFNKYAINWVRQAPGKGLEWVARIRSKYNNYATYYADQVKDRFTISRDDSKNTAYLQMNNLKTEDTAVYYCVRHANFGNSYISYWAYWGQGTLVTVSSGGGGSGGGGSGGGGSQTVVTQEPSLTVSPGGTVTLTCASSTGAVTSGNYPNWVQQKPGQAPRGLIGGTKFLVPGTPARFSGSLLGGKAALTLSGVQPEDEAEYYCTLWYSNRWVFGGGTKLTVLHHHHHH

SEQ ID NO: 3858 - protein, 528 aa, synthetic construct
  REGION 1..528: note = Description of Artificial Sequence: Synthetic polypeptide
QDGNEEGGGGKPLGLQARVVGGGGQVQLVESGGGVVQAGGSLTLSCAASGSTFSIRAMRWYRQAPGTERDLVAVIYGSSTYYADAVKGRFTISRDNSKNTLYLQMNSLRAEDTAVYYCNADTIGTARDYWGQGTLVTVSSGGGGSGGGSEVQLVESGGGLVQPGNSLRLSCAASGFTFSKFGMSWVRQAPGKGLEWVSSISGSGRDTLYADSVKGRFTISRDNAKTTLYLQMNSLRPEDTAVYYCTIGGSLSVSSQGTLVTVSSGGGGSGGGSEVQLVESGGGLVQPGGSLKLSCAASGFTFNKYAINWVRQAPGKGLEWVARIRSKYNNYATYYADQVKDRFTISRDDSKNTAYLQMNNLKTEDTAVYYCVRHANFGNSYISYWAYWGQGTLVTVSSGGGGSGGGGSGGGGSQTVVTQEPSLTVSPGGTVTLTCASSTGAVTSGNYPNWVQQKPGQAPRGLIGGTKFLVPGTPARFSGSLLGGKAALTLSGVQPEDEAEYYCTLWYSNRWVFGGGTKLTVLHHHHHH

SEQ ID NO: 3859 - protein, 20 aa, synthetic construct
  REGION 1..20: note = Description of Artificial Sequence: Synthetic peptide
  VARIANT 1..20: note = SITE - This sequence may encompass 1-10 GS repeating units
GSGSGSGSGSGSGSGSGSGS

SEQ ID NO: 3860 - protein, 30 aa, synthetic construct
  REGION 1..30: note = Description of Artificial Sequence: Synthetic polypeptide
  VARIANT 1..30: note = SITE - This sequence may encompass 1-10 GGS repeating units
GGSGGSGGSGGSGGSGGSGGSGGSGGSGGS

SEQ ID NO: 3861 - protein, 40 aa, synthetic construct
  REGION 1..40: note = Description of Artificial Sequence: Synthetic polypeptide
  VARIANT 1..40: note = SITE - This sequence may encompass 1-10 GGGS repeating units
GGGSGGGSGGGSGGGSGGGSGGGSGGGSGGGSGGGSGGGS

SEQ ID NO: 3862 - protein, 40 aa, synthetic construct
  REGION 1..40: note = Description of Artificial Sequence: Synthetic polypeptide
  VARIANT 1..40: note = SITE - This sequence may encompass 1-10 GGSG repeating units
GGSGGGSGGGSGGGSGGGSGGGSGGGSGGGSGGGSGGGSG

SEQ ID NO: 3863 - protein, 50 aa, synthetic construct
  REGION 1..50: note = Description of Artificial Sequence: Synthetic polypeptide
  VARIANT 1..50: note = SITE - This sequence may encompass 1-10 GGSGG repeating units
GGSGGGGSGGGGSGGGGSGGGGSGGGGSGGGGSGGGGSGGGGSGGGGSGG

SEQ ID NO: 3864 - protein, 50 aa, synthetic construct
  REGION 1..50: note = Description of Artificial Sequence: Synthetic polypeptide
  VARIANT 1..50: note = SITE - This sequence may encompass 1-10 GGGGS repeating units
GGGGSGGGGSGGGGSGGGGSGGGGSGGGGSGGGGSGGGGSGGGGSGGGGS

SEQ ID NO: 3865 - protein, 50 aa, synthetic construct
  REGION 1..50: note = Description of Artificial Sequence: Synthetic polypeptide
  VARIANT 1..50: note = SITE - This sequence may encompass 1-10 GGGGG repeating units
GGGGGGGGGGGGGGGGGGGGGGGGGGGGGGGGGGGGGGGGGGGGGGGGGG

SEQ ID NO: 3866 - protein, 30 aa, synthetic construct
  REGION 1..30: note = Description of Artificial Sequence: Synthetic polypeptide
  VARIANT 1..30: note = SITE - This sequence may encompass 1-10 GGG repeating units
GGGGGGGGGGGGGGGGGGGGGGGGGGGGGG

SEQ ID NO: 3867 - protein, 20 aa, synthetic construct
  REGION 1..20: note = Description of Artificial Sequence: Synthetic peptide
GGGGSGGGGSGGGGSGGGGS

SEQ ID NO: 3868 - protein, 15 aa, synthetic construct
  REGION 1..15: note = Description of Artificial Sequence: Synthetic peptide
GGGGSGGGGSGGGGS

SEQ ID NO: 3869 - protein, 5 aa, synthetic construct
  REGION 1..5: note = Description of Artificial Sequence: Synthetic peptide
LPETG

SEQ ID NO: 3870 - protein, 6 aa, synthetic construct
  REGION 1..6: note = Description of Artificial Sequence: Synthetic 6x His tag
HHHHHH

SEQ ID NO: 3871 - protein, 9 aa, synthetic construct
  REGION 1..9: note = Description of Artificial Sequence: Synthetic peptide
GGGGSGGGS

SEQ ID NO: 3872 - protein, 4 aa, synthetic construct
  REGION 1..4: note = Description of Artificial Sequence: Synthetic peptide
SGGG

SEQ ID NO: 3873 - protein, 523 aa, synthetic construct; identical to SEQ ID NO: 3854
  REGION 1..523: note = Description of Artificial Sequence: Synthetic polypeptide

SEQ ID NO: 3874 - protein, 523 aa, synthetic construct
  REGION 1..523: note = Description of Artificial Sequence: Synthetic polypeptide
QDGNEEGGGGKPLGLQAGVVGGGGEVQLVESGGGLVQPGGSLTLSCAASGSTFSINHFSWYRQAPGKQRELVAFISSDGVSIDVESVKGRFTISGDNSKNTAYLQMNSLRAEDTAVYYCYYRGFWGQGTLVTVSSGGGGSGGGSEVQLVESGGGLVQPGNSLRLSCAASGFTFSKFGMSWVRQAPGKGLEWVSSISGSGRDTLYADSVKGRFTISRDNAKTTLYLQMNSLRPEDTAVYYCTIGGSLSVSSQGTLVTVSSGGGGSGGGSEVQLVESGGGLVQPGGSLKLSCAASGFTFNKYAINWVRQAPGKGLEWVARIRSKYNNYATYYADQVKDRFTISRDDSKNTAYLQMNNLKTEDTAVYYCVRHANFGNSYISYWAYWGQGTLVTVSSGGGGSGGGGSGGGGSQTVVTQEPSLTVSPGGTVTLTCASSTGAVTSGNYPNWVQQKPGQAPRGLIGGTKFLVPGTPARFSGSLLGGKAALTLSGVQPEDEAEYYCTLWYSNRWVFGGGTKLTVLHHHHHH

SEQ ID NO: 3875 - protein, 499 aa, synthetic construct; identical to SEQ ID NO: 3457
  REGION 1..499: note = Description of Artificial Sequence: Synthetic polypeptide

SEQ ID NO: 3876 - protein, 653 aa, synthetic construct; identical to SEQ ID NO: 3842
  REGION 1..653: note = Description of Artificial Sequence: Synthetic polypeptide

SEQ ID NO: 3877 - protein, 503 aa, synthetic construct; identical to SEQ ID NO: 3377
  REGION 1..503: note = Description of Artificial Sequence: Synthetic polypeptide

SEQ ID NO: 3878 - protein, 10 aa, synthetic construct
  REGION 1..10: note = Description of Artificial Sequence: Synthetic peptide
KPLGLQAGVV

SEQ ID NO: 3879 - protein, 6 aa, synthetic construct
  REGION 1..6: note = Description of Artificial Sequence: Synthetic peptide
VVGGGG

SEQ ID NO: 3880 - protein, 121 aa, synthetic construct
  REGION 1..121: note = Description of Artificial Sequence: Synthetic polypeptide
EVQLLESGGGLVQPGGSLTLSCAASGRTFSNYNMGWFRQAPGKEREFVAAIDWSGGSPYYAASVKGRFTISRDNSKNTLYLQMNSLRAEDTAVYYCAAPLSYGSTWLADYWGQGTLVTVSS

SEQ ID NO: 3881 - protein, 515 aa, synthetic construct
  REGION 1..515: note = Description of Artificial Sequence: Synthetic polypeptide
VVGGGGEVQLLESGGGLVQPGGSLTLSCAASGRTFSNYNMGWFRQAPGKEREFVAAIDWSGGSPYYAASVKGRFTISRDNSKNTLYLQMNSLRAEDTAVYYCAAPLSYGSTWLADYWGQGTLVTVSSGGGGSGGGSEVQLVESGGGLVQPGNSLRLSCAASGFTFSKFGMSWVRQAPGKGLEWVSSISGSGRDTLYADSVKGRFTISRDNAKTTLYLQMNSLRPEDTAVYYCTIGGSLSVSSQGTLVTVSSGGGGSGGGSEVQLVESGGGLVQPGGSLKLSCAASGFTFNKYAINWVRQAPGKGLEWVARIRSKYNNYATYYADQVKDRFTISRDDSKNTAYLQMNNLKTEDTAVYYCVRHANFGNSYISYWAYWGQGTLVTVSSGGGGSGGGGSGGGGSQTVVTQEPSLTVSPGGTVTLTCASSTGAVTSGNYPNWVQQKPGQAPRGLIGGTKFLVPGTPARFSGSLLGGKAALTLSGVQPEDEAEYYCTLWYSNRWVFGGGTKLTVLHHHHHH

SEQ ID NO: 3882 - protein, 533 aa, synthetic construct
  REGION 1..533: note = Description of Artificial Sequence: Synthetic polypeptide
QDGNEEGGGGKPLGLQARVVGGGGEVQLLESGGGLVQPGGSLTLSCAASGRTFSNYNMGWFRQAPGKEREFVAAIDWSGGSPYYAASVKGRFTISRDNSKNTLYLQMNSLRAEDTAVYYCAAPLSYGSTWLADYWGQGTLVTVSSGGGGSGGGSEVQLVESGGGLVQPGNSLRLSCAASGFTFSKFGMSWVRQAPGKGLEWVSSISGSGRDTLYADSVKGRFTISRDNAKTTLYLQMNSLRPEDTAVYYCTIGGSLSVSSQGTLVTVSSGGGGSGGGSEVQLVESGGGLVQPGGSLKLSCAASGFTFNKYAINWVRQAPGKGLEWVARIRSKYNNYATYYADQVKDRFTISRDDSKNTAYLQMNNLKTEDTAVYYCVRHANFGNSYISYWAYWGQGTLVTVSSGGGGSGGGGSGGGGSQTVVTQEPSLTVSPGGTVTLTCASSTGAVTSGNYPNWVQQKPGQAPRGLIGGTKFLVPGTPARFSGSLLGGKAALTLSGVQPEDEAEYYCTLWYSNRWVFGGGTKLTVLHHHHHH

SEQ ID NO: 3883 - protein, 4 aa, synthetic construct
  REGION 1..4: note = Description of Artificial Sequence: Synthetic peptide
GGGG

SEQ ID NO: 3884 - protein, 4 aa, synthetic construct
  REGION 1..4: note = Description of Artificial Sequence: Synthetic peptide
GGGS

SEQ ID NO: 3885 - protein, 4 aa, synthetic construct
  REGION 1..4: note = Description of Artificial Sequence: Synthetic peptide
GGGT

SEQ ID NO: 3886 - protein, 5 aa, synthetic construct
  REGION 1..5: note = Description of Artificial Sequence: Synthetic peptide
GGGGG

SEQ ID NO: 3887 - protein, 5 aa, synthetic construct
  REGION 1..5: note = Description of Artificial Sequence: Synthetic peptide
GGGGS

SEQ ID NO: 3888 - protein, 5 aa, synthetic construct
  REGION 1..5: note = Description of Artificial Sequence: Synthetic peptide
GGGGT

1-154. (canceled)

155. A pharmaceutical composition comprising an extended-release binding protein, wherein the extended-release binding protein comprises a half-life extended immune cell engaging protein, a masking peptide, and a cleavable linker; wherein the half-life extended immune cell engaging protein comprises a first domain (A), a second domain (B), and a third domain (C), wherein:
(i) the first domain (A) comprises an immune cell engaging domain,
(ii) the second domain (B) comprises a half-life extended domain, and
(iii) the third domain (C) specifically binds to a target antigen;
wherein the cleavable linker covalently links the masking peptide to the N-terminus or the C-terminus of the half-life-extended immune cell engaging protein, and
wherein the cleavable linker is significantly cleaved in systemic circulation.

156. The pharmaceutical composition of claim 155, wherein the domains are linked in one of the following orders: H₂N-(C)-(B)-(A)-COOH, H₂N-(A)-(B)-(C)-COOH, H₂N-(B)-(A)-(C)-COOH, H₂N-(C)-(A)-(B)-COOH, H₂N-(A)-(C)-(B)-COOH, H₂N-(B)-(C)-(A)-COOH, or by linkers L1 and L2 in one of the following orders: H₂N-(C)-L1-(B)-L2(A)-COOH, H₂N-(A)-L1-(B)-L2-(C)-COOH, H₂N-(B)-L1-(A)-L2-(C)-COOH, H₂N-(C)-L1-(A)-L2-(B)-COOH, H₂N-(A)-L1-(C)-L2(B)-COOH, H₂N-(B)-L1-(C)-L2-(A)-COOH.

157. The pharmaceutical composition of claim 156, wherein the domains of the half-life extended immune cell engaging protein are linked in one of the following orders: H₂N-(C)-(B)-(A)-COOH, H₂N-(C)-(A)-(B)-COOH, or by linkers L1 and L2 in one of the following orders: H₂N-(C)-L1-(B)-L2-(A)-COOH, H₂N-(C)-L1-(A)-L2-(B)-COOH.

158. The pharmaceutical composition of claim 155, wherein the immune cell engaging domain comprises a natural killer (NK) cell engaging domain, a T cell engaging domain, a NK-T cell engaging domain, a B cell engaging domain, a dendritic cell engaging domain, a macrophage cell engaging domain, or a combination thereof.

159. The pharmaceutical composition of claim 158, wherein the immune cell engaging domain comprises the T cell engaging domain.

160. The pharmaceutical composition of claim 159, wherein the T cell engaging domain binds a CD3 molecule, and wherein the CD3 molecule is at least one of: a CD3γ molecule, a CD3δ molecule, or a CD3ε molecule.

161. The pharmaceutical composition of claim 155, wherein the first domain comprises a single-chain variable fragment (scFv) specific to human CD3;
wherein the scFv comprises a variable heavy chain region (VH), a variable light chain region (VL), and a linker, wherein VH comprises complementarity determining regions HC CDR1, HC CDR2, and HC CDR3, and wherein VL comprises complementarity determining regions LC CDR1, LC CDR2, and LC CDR3; and
wherein HC CDR1 comprises an amino acid sequence selected from the group consisting of SEQ ID NOs: 3081 and 3087-3098, the HC CDR2 comprises an amino acid sequence selected from the group consisting of SEQ ID NOs: 3082 and 3099-3109, the HC CDR3 comprises an amino acid sequence selected from the group consisting of SEQ ID NOs: 3083 and 3110-3119; and
wherein the LC CDR1 comprises an amino acid sequence selected from the group consisting of SEQ ID NOs: 3084 and 3120-3132, the LC CDR2 comprises an amino acid sequence selected from the group consisting of SEQ ID NOs: 3085 and 3099-3109, the LC CDR3 comprises an amino acid sequence selected from the group consisting of SEQ ID NOs: 3086 and 3146-3152.

162. The pharmaceutical composition of claim 161, wherein the HC CDR1 comprises the amino acid sequence of SEQ ID NO: 3097, the HC CDR2 comprises the amino acid sequence of SEQ ID NO: 3108, the HC CDR3 comprises the amino acid sequence of SEQ ID NO: 3110; and wherein the LC CDR1 comprises the amino acid sequence of SEQ ID NO: 3120, the LC CDR2 comprises the amino acid sequence of SEQ ID NO: 3145, the LC CDR3 comprises the amino acid sequence of SEQ ID NO: 3146.

163. The pharmaceutical composition of claim 155, wherein the first domain comprises an amino acid sequence selected from the group consisting of SEQ ID NOS: 3153-3169.

164. The pharmaceutical composition of claim 155, wherein the second domain comprises a single domain antibody (sdAb) which specifically binds to HSA;
wherein the sdAb comprises complementarity determining regions CDR1, CDR2, and CDR3, wherein the CDR1 comprises an amino acid sequence selected from the group consisting of SEQ ID NOS: 3170 and 3173-3175, the CDR2 comprises an amino acid sequence selected from the group consisting of SEQ ID NOS: 3171 and 3176-3181, the CDR3 comprises an amino acid sequence selected from the group consisting of SEQ ID NOS: 3172 and 8182-3183.

165. The pharmaceutical composition of claim 155, wherein the second domain comprises an amino acid sequence selected from the group consisting of SEQ ID NOs: 3184-3193.

166. The pharmaceutical composition of claim 155, wherein the masking peptide inhibits or reduces the binding of the first domain (A) to the human CD3 or the binding of the third domain (C) to the target antigen.

167. The pharmaceutical composition of claim 166, wherein the masking peptide comprises an amino acid sequence having an amino acid sequence selected from the group consisting of SEQ ID NOS: 3663-3682.

168. The pharmaceutical composition of claim 155, wherein the cleavable linker comprises a cleavage site recognizable by a protease, and wherein the protease is selected from the group consisting of a serine protease, a cysteine protease, an aspartate protease, a threonine protease, a glutamic acid protease, a metalloproteinase, a gelatinase, and an asparagine peptide lyase.

169. The pharmaceutical composition of claim 155, wherein the cleavable linker comprises an amino acid sequence having at least 80% homology to any one of SEQ ID NOs: 3688-3770 and 3878.

170. The pharmaceutical composition of claim 155, wherein the target antigen is a tumor antigen.

171. The pharmaceutical composition of claim 170, wherein the target antigen comprises CD19, CD20, CD33, FLT3, PSMA, MSLN, BCMA, DLL3, EGFR, or EpCAM.

172. The pharmaceutical composition of claim 171, wherein the third domain comprises an amino acid sequence having at least 80% homology to any one of SEQ ID NOs: 346-461, 476-489, 607-650, 798-846, 961-1079, 1308-1750, 3495-3496, 3771-3792, 3793-3808 3809-3823, and 3880.

173. The pharmaceutical composition of claim 172, wherein the third domain comprises an amino acid sequence of SEQ ID NO: 383, 489, 647, 999, 1003, 1074, 1076, 1739, 3495, 3496, 3771, or 3809.

174. The pharmaceutical composition of claim 171, wherein the third domain comprises
(i) a single domain antibody that specifically binds to FLT3, and wherein the third domain comprises a CDR1 comprising an amino acid selected from the group consisting of SEQ ID NOS: 1080-1155 and 3497-3498, a CDR2 comprising an amino acid selected from the group consisting of SEQ ID NOS: 1156-1231 and 3499-3500, a CDR3 comprising an amino acid selected from the group consisting of SEQ ID NOS: 1232-1307 and 3501-3502;
(ii) a single domain antibody that specifically binds to PSMA, and wherein the third domain comprises a CDR1 comprising an amino acid sequence selected from the group consisting of SEQ ID NOS: 462-465, a CDR2 comprising an amino acid sequence selected from the group consisting of SEQ ID NOS: 466-472, and a CDR3 comprising an amino acid sequence selected from the group consisting of SEQ ID NOS: 474-475;
(iii) a single domain antibody that specifically binds to MSLN, and wherein the third domain comprises a CDR1 comprising an amino acid sequence selected from the group consisting of SEQ ID NOS: 490-528, a CDR2 comprising an amino acid selected from the group consisting of SEQ ID NOS: 529-567, and a CDR3 comprising an amino acid selected from the group consisting of SEQ ID NOS: 568-606;
(iv) a single domain antibody that specifically binds to BCMA, and wherein the third domain CDR1 comprises comprising an amino acid selected from the group consisting of SEQ ID NOS: 1-115, a CDR2 comprising an amino acid selected from the group consisting of SEQ ID NOS: 116-230, and a CDR3 comprising an amino acid selected from the group consisting of SEQ ID NOS: 231-345;
(v) a single domain antibody that specifically binds to DLL3, and wherein the third domain comprises a CDR1 comprising an amino acid selected from the group consisting of SEQ ID NOS: 1751-2193, a CDR2 comprising an amino acid selected from the group consisting of SEQ ID NOS: 2194-2636, and a CDR3 comprising an amino acid selected from the group consisting of SEQ ID NOS: 2637-3080;
(vi) a single domain antibody that specifically binds to EGFR, and wherein the third domain comprises a CDR1 comprising an amino acid selected from the group consisting of SEQ ID NOS: 651-699, a CDR2 comprising an amino acid selected from the group consisting of SEQ ID NOS: 700-748, a CDR3 comprising an amino acid selected from the group consisting of SEQ ID NOS: 479-797; or
(vii) a single domain antibody that specifically binds to EpCAM, and wherein the third domain comprises a CDR1 comprising an amino acid selected from the group consisting of SEQ ID NOS: 847-884, a CDR2 comprising an amino acid selected from the group consisting of SEQ ID NOS: 885-922, a CDR3 comprising an amino acid selected from the group consisting of SEQ ID NOS: 923-960.

175. The pharmaceutical composition of claim 171, wherein the half-life extended immune cell engaging protein comprises an amino acid sequence having at least 80% homology to any one of SEQ ID NOS: 3824-3831, 3833-3837, and 3839-3858.

176. The pharmaceutical composition of claim 171, wherein the half-life extended immune cell engaging protein comprises an amino acid sequence of any one of SEQ ID NOS: 3824-3831, 3833-3837, and 3839-3858.

177. The pharmaceutical composition of claim 155, wherein linkers L1 and L2 are each, independently, (GS)n (SEQ ID NO: 3859), (GGS)n (SEQ ID NO: 3860), (GGGS)n (SEQ ID NO: 3861), (GGSG)n (SEQ ID NO: 3862), (GGSGG)n (SEQ ID NO: 3863), (GGGGS)n (SEQ ID NO: 3864), (GGGGG)n (SEQ ID NO: 3865), or (GGG)n (SEQ ID NO: 3866), wherein n is 1, 2, 3, 4, 5, 6, 7, 8, 9, or 10, (GGGGSGGGGSGGGGSGGGGS)(SEQ ID NO: 3867), (GGGGSGGGGSGGGGS) (SEQ ID NO: 3868), LPETG (SEQ ID NO: 3869), (GGGGSGGGS) (SEQ ID NO: 3871) or SGGG (SEQ ID NO: 3872).

178. The pharmaceutical composition of claim 155, wherein
(i) the extended-release binding protein has a higher therapeutic index than a corresponding half-life-extended immune cell engaging protein without the masking peptide;
(ii) administration of the extended-release binding protein results in a lower Cmax/Cmin ratio of an active version of the extended-release binding protein in systemic circulation than the Cmax/Cmin ratio when a corresponding half-life extended immune cell engaging protein without the masking peptide is administered;
(iii) multiple administration of the extended-release binding protein results in a more gradual increase of a level of an active version of the extended-release binding protein in systemic circulation than when a corresponding half-life-extended immune cell engaging protein without the masking peptide is administered; or
(iv) administration of the extended-release binding protein results in a lower Cytokine release syndrome (CRS) level than the CRS observed when a corresponding half-life extended immune cell engaging protein without the masking peptide is administered.

179. A method for treatment or amelioration of a disease, comprising administrating to a subject in need thereof a pharmaceutical composition of claim 155.

180. The method of claim 179, wherein the disease is cancer.
